(19) United States
(12) Patent Application Publication
(10) Pub. No.: US 2024/0026014 A1
(43) Pub. Date: Jan. 25, 2024

(54) COMPOSITIONS AND METHODS RELATED TO RECEPTOR PAIRINGS

(71) Applicant: Synthekine, Inc., Menlo Park, CA (US)

(72) Inventors: Robert Kastelein, Menlo Park, CA (US); Patrick J. Lupardus, Menlo Park, CA (US); Deepti Rokkam, Menlo Park, CA (US)

(21) Appl. No.: 18/019,042

(22) PCT Filed: Aug. 5, 2021
(86) PCT No.: PCT/US2021/044730

§ 371 Date: Jan. 31, 2023

Related U.S. Application Data
(60) Provisional application No. 63/061,562, filed on Aug. 5, 2020.
(60) Provisional application No. 63/078,745, filed on Sep. 15, 2020.
(60) Provisional application No. 63/135,884, filed on Jan. 11, 2021.

(51) Int. Cl. C07K 16/28

(52) U.S. Cl. CPC C07K 16/2866; C07K 16/2803; C07K 2317/569; A61K 2039/505

(57) ABSTRACT

Provided herein are receptor binding proteins that bind to either natural cytokine receptor pairs or non-natural cytokine receptor pairs to create signaling diversity beyond natural receptor pairings.

### CROSS-REFERENCE TO RELATED PATENT APPLICATIONS

[0001] This application is a national stage application under 35 U.S.C. 371 of PCT/US2021/044730, filed Aug. 5, 2021, which claims priority to U.S. Provisional Application No. 63/061,562, filed Aug. 5, 2020, U.S. Provisional Application No. 63/078,745, filed Sep. 15, 2020, and U.S. Provisional Application No. 63/135,884, filed Jan. 11, 2021, the disclosures of which are hereby incorporated by reference in their entirety for all purposes.

### SEQUENCE LISTING

[0002] The instant application contains a Sequence Listing which has been submitted electronically in ASCII format and is hereby incorporated by reference in its entirety. Said ASCII copy, created on Jan. 30, 2023, is named 106249-1361943-001141US_SL.txt and is 725,670 bytes in size.

### BACKGROUND OF THE DISCLOSURE

[0003] Cytokine and growth-factor ligands typically signal through homodimeric or heterodimeric cell surface receptors via Janus Kinase (JAK/TYK), or Receptor Tyrosine Kinase (RTK)-mediated transphosphorylation. However, the number of receptor dimer pairings occurring in nature is limited to those driven by natural ligands encoded within the genome.

[0004] In some instance, cytokines act as multispecific (e.g., bispecific or trispecific) ligands. Cytokines determine which receptors are included in the dimers by binding to the extracellular domain of each of the two receptors. Cytokines thus act to bridge or crosslink the receptors in a signaling complex. Cytokine receptor domain or subunit association leads to, among other effects, the activation of an intracellular JAK/STAT signaling pathway, which includes one or more of the four Janus Kinases (JAK1-3 and TYK2) (Ihle, Nature 377(6550):591-4, 1995; O'Shea and Plenge, Immunity 36(4):542-50, 2012) and several signal transducer and activator of transcription (STATs 1-6) proteins (Delgoffe, et al., Curr Opin Immunol. 23(5):632-8, 2011; Levy and Darnell, Nat Rev Mol Cell Biol. 3(9):651-62, 2002; Murray, J Immunol. 178(5):2623-9, 2007). While cytokines typically bind specifically to the extracellular domains of cell surface receptors, the JAK/TYK/STAT signaling modules are found in many combinations in endogenous cytokine receptor signaling complexes.

[0005] Given that the a ligand determines the composition of receptor domains or subunits in a receptor complex and the intracellular JAK/TYK and RTK enzymes are degenerate, the number of cytokine and growth factor receptor dimer pairings that occur in nature represents only a fraction of the total number of signaling-competent receptor pairings theoretically allowed by the system. For example, the human genome encodes for approximately forty different JAK/STAT cytokine receptors. In principle, approximately 1600 unique homodimeric and heterodimeric cytokine receptor pairs could be generated with the potential to signal through different JAK/TYK/STAT combinations (Bazan, Proc Natl Acad Sci USA. 87(18):6934-8, 1990; Huising et al., J Endocrinol. 189(1):1-25, 2006). However, as of the present knowledge, the human genome encodes for less than fifty different cytokine ligands (Bazan, Proc Natl Acad Sci USA. 87(18):6934-8, 1990; Huising et al., J Endocrinol. 189(1):1-25, 2006), limiting the scope of cytokine receptor complexes signaling to those that can be assembled by the natural ligands.

### SUMMARY OF THE DISCLOSURE

[0006] In one aspect, provided herein is an IL12 receptor (IL12R) binding protein that specifically binds to IL12Rβ1 and IL12Rβ2, wherein the binding protein causes the multimerization of IL12Rβ1 and IL12Rβ2 and the multimerization results in the association of intracellular domains of IL12Rβ1 and IL12Rβ2 and intraceullar signaling, and wherein the binding protein comprises a single-domain antibody (sdAb) that specifically binds to IL12Rβ1 (an anti-IL12Rβ1 sdAb) and a sdAb that specifically binds to IL12Rβ2 (an anti-IL12Rβ2 sdAb).

[0007] In some embodiments, the anti-IL12Rβ1 sdAb is a V_{H}H antibody (an anti IL12Rβ1 V_{H}H antibody) and/or the anti-IL12Rβ2 sdAb is a V_{H}H antibody (an anti IL12Rβ2 V_{H}H antibody). In some embodiments, the anti-IL12Rβ1 sdAb and the anti-IL12Rβ2 sdAb are joined directly or via a peptide linker. In some embodiments, the peptide linker comprises between 1 and 50 amino acids. In some embodiments, the IL12R binding protein has a reduced Eₘₐₓ compared to IL12. In some embodiments, the IL12R binding protein has an increased Eₘₐₓ compared to IL12. In some embodiments, the IL12R binding protein has a similar potency compared to that of IL12.

[0008] In another aspect, the disclosure provides a method for treating neoplastic diseases, such as cancer in a subject in need thereof, the method comprising the step of administering to the subject the IL12R binding protein as described herein, wherein the IL12R binding protein binds to and activates natural killer, CD4⁺ T cells, and/or CD8⁺ T cells. In some embodiments, the cancer is a solid tumor cancer.

[0009] In another aspect, the disclosure provides an IL27 receptor (IL27R) binding protein that specifically binds to IL27Rα subunit (IL27Rα) and glycoprotein 130 subunit (gp130), wherein the binding protein causes the multimerization of IL27Rα and gp130 and the multimerization results in the association of intracellular domains of IL27Rα and gp130 and intraceullar signaling, and wherein the binding protein comprises a single-domain antibody (sdAb) that specifically binds to IL27Rα (an anti-IL27Rα sdAb) and a sdAb that specifically binds to gp130 (an anti-gp130 sdAb).

[0010] In some embodiments, the anti-IL27Rα sdAb is a V_{H}H antibody (an anti IL27Rα V_{H}H antibody) and/or the anti-gp130 sdAb is a V_{H}H antibody (an anti gp130 V_{H}H antibody). In some embodiments, the anti-IL27Rα sdAb and the anti-gp130 sdAb are joined directly or via a peptide linker. In some embodiments, the peptide linker comprises between 1 and 50 amino acids.

[0011] In another aspect, the disclosure provides a method for treating neoplastic diseases, such as cancer in a subject in need thereof, comprising administering to the subject the IL27R binding protein described herein, wherein the IL27R binding protein binds to and activates CD8⁺ T cells, CD4⁺ T cells, and/or T regulatory (Treg) cells. In some embodiments, the IL27R binding protein binds to and activates CD8⁺ T cells. In some embodiments, the IL27R binding protein binds to and activates CXCR5⁺ CD8⁺ T cells. In some embodiments, the cancer is a solid tumor cancer.

[0012] In another aspect, the disclosure provides an IL10 receptor (IL10R) binding protein that specifically binds to IL10Rα subunit (IL10Rα, also referred to herein as IL10R1) and IL10Rβ (also referred to herein as IL10R2), wherein the binding protein causes the multimerization of IL10Rα and IL10Rβ and the multimerization results in the association of intracellular domains of IL10Rα and IL10Rβ and intraceullar signaling, and wherein the binding protein comprises a single-domain antibody (sdAb) that specifically binds to IL10Rα (an anti-IL10Rα sdAb) and a sdAb that specifically binds to IL10Rβ (an anti-IL10Rβ sdAb).

[0013] In some embodiments, the anti-IL10Rα sdAb is a V_{H}H antibody (an anti IL10Rα V_{H}H antibody) and/or the anti-IL10Rβ sdAb is a V_{H}H antibody (an anti IL10Rβ V_{H}H antibody). In some embodiments, the anti-IL10Rα sdAb and the anti-IL10Rβ sdAb are joined by a peptide linker. In some embodiments, the peptide linker comprises between 1 and 50 amino acids.

[0014] In another aspect, the disclosure provides a method for treating neoplastic diseases, such as cancer in a subject in need thereof, comprising administering to the subject the IL10R binding protein described herein, wherein the IL10R binding protein binds to and activates CD8⁺ T cells, CD4⁺ T cells, macrophages, and/or Treg cells. In some embodiments, the IL10R binding protein provides longer therapeutic efficacy than a pegylated IL10. In some embodiments, the cancer is a solid tumor cancer.

[0015] In other aspects, the IL10R binding proteins described herein can also be used to treat inflammatory diseases, such as Crohn's disease and ulcerative colitis, and autoimmune diseases, such as psoriasis, rheumatoid arthritis, and multiple sclerosis.

[0016] In another aspect, the disclosure provides an interferon (IFN) λ receptor (IFNλR) binding protein that specifically binds to IL10Rβ and IL28 receptor (IL28R) α subunit (IL28Rα), wherein the binding protein causes the multimerization of IL10Rβ and IL28Rα and downstream signaling, and wherein the binding protein comprises a single-domain antibody (sdAb) that specifically binds to IL10Rβ (an anti-IL10Rβ sdAb) and a sdAb that specifically binds to IL28Rα (an anti-IL28Rα sdAb).

[0017] In some embodiments, the anti-IL10Rβ sdAb is a V_{H}H antibody (an anti-IL10Rβ V_{H}H antibody) and/or the anti-IL28Rα sdAb is a V_{H}H antibody (an anti IL28Rα V_{H}H antibody). In some embodiments, the anti-IL10Rβ sdAb and the anti-IL28Rα sdAb are joined directly or via a peptide linker. In some embodiments, the peptide linker comprises between 1 and 50 amino acids.

[0018] In another aspect, the disclosure features a method for treating an infectious disease in a subject in need thereof, comprising administering to the subject an IFNλR binding protein described herein, wherein the IFNλR binding protein binds to and activates macrophages, CD8⁺ T cells, CD4⁺ T cells, Treg cells, dendritic cells, and/or epithelial cells. In some embodiments, the IFNλR binding protein binds to and activates macrophages. In some embodiments, the infectious disease is influenza, hepatitis B, hepatitis C, or human immunodeficiency virus (HIV) infection.

[0019] In another aspect, the disclosure provides a binding protein that specifically binds to IL10Rα and IL2Rγ, wherein the binding protein causes the multimerization of IL10Rα and IL2Rγ and downstream signaling, and wherein the binding protein comprises a sdAb that specifically binds to IL10Rα (an anti-IL10Rα sdAb) and a sdAb that specifically binds to IL2Rγ (an anti-IL2Rγ sdAb).

[0020] In some embodiments, the anti-IL10Rα sdAb is a V_{H}H antibody (an anti-IL10Rα V_{H}H antibody) and/or the anti-IL2Rγ sdAb is a V_{H}H antibody (an anti IL2Rγ V_{H}H antibody). In some embodiments, the anti-IL10Rα sdAb and the anti-IL2Rγ sdAb are joined directly or via a peptide linker. In some embodiments, the peptide linker comprises between 1 and 50 amino acids.

[0021] In another aspect, the disclosure provides a method for treating neoplastic diseases, such as cancer in a subject in need thereof, comprising administering to the subject the binding protein that specifically binds to IL10Rα and IL2Rγ described herein, wherein the binding protein binds to and activates CD8⁺ T cells and/or CD4⁺ T cells. In some embodiments, the method does not cause anemia.

[0022] In another aspect, the disclosure provides a binding protein that specifically binds to a first receptor and a second receptor, wherein the first receptor is interferon γ receptor 1 (IFNγR1) or IL28Rα and the second receptor is preferentially expressed on myeloid cells and/or T cells, wherein the binding protein causes the multimerization of the first receptor and the second receptor and their downstream signaling, and wherein the binding protein comprises a single-domain antibody (sdAb) that specifically binds to the first receptor and a sdAb that specifically binds to the second receptor.

[0023] In some embodiments, the sdAb that specifically binds to a first receptor is an anti-IFNγR1 V_{H}H antibody. In some embodiments, the sdAb that specifically binds to a first receptor is an anti-IL28Rα V_{H}H antibody. In some embodiments, the first receptor is IFNγR1 and the second receptor is IL2Rγ. In some embodiments, the first receptor is IL28Rα and the second receptor is IL2Rγ. In some embodiments, the sdAb that specifically binds to the first receptor and the sdAb that specifically binds to the second receptor are joined directly or via a peptide linker. In some embodiments, the peptide linker comprises between 1 and 50 amino acids.

[0024] In another aspect, the disclosure provides a method for treating neoplastic diseases, such as cancer in a subject in need thereof, comprising administering to the subject the binding protein that binds to a first receptor (e.g., IFNγR1 or IL28Rα) and a second receptor (e.g., a receptor preferentially expressed on myeloid cells and/or T cells) described herein, wherein the binding protein binds to and activates myeloid cells and/or T cells. In some embodiments, the binding protein binds to and activates macrophages. In some embodiments, the binding protein binds to and activates CD8⁺ T cells and/or CD4⁺ T cells.

### DETAILED DESCRIPTION OF THE DISCLOSURE

### I. Introduction

[0025] The present disclosure provides compositions useful in the pairing of cellular receptors to generate desirable effects useful in treatment of diseases. In general, binding proteins are provided that comprise at least a first domain that binds to a first receptor and a second domain that binds to a second receptor, such that upon contacting with a cell expressing the first and second receptors, the binding protein causes the functional association of the first and second receptors, thereby triggering their interaction and resulting in downstream signaling. In some embodiments, the first and second receptors occur in proximity in response to certain cytokine binding and are referred to herein as “natural” cytokine receptor pairs. In other embodiments, the binding proteins described herein bind to two receptors that do not naturally interact via binding to a naturally occurring cytokine and are referred to herein as “unnatural” cytokine receptor pairs.

[0026] Several advantages flow from the binding proteins described herein. In the case of natural cytokine receptor pairs, the natural cytokines cause the natural cytokine receptor pairs to come into proximity (i.e., by their simultaneous binding of a cytokine). However, when some of these natural cytokines are used as therapeutics in mammalian, particularly human, subjects they may also trigger a number of adverse and undesirable effects by a variety of mechanisms including the presence of the natural cytokine receptor on other cell types and the binding to those same receptor pairs on the other cell types can cause unwanted effects or trigger undesired signaling. The present disclosure is directed to manipulating the multiple effects of cytokines so that desired therapeutic signaling occurs, particularly in a desired cellular or tissue subtype, while minimizing undesired activity and/or intracellular signaling.

[0027] In some embodiment, the binding proteins described herein are designed such that the binding proteins provide the maximal desired signaling from the natural cytokine receptor pairs on the desired cell types, while the signaling from the receptors on other undesired cell types is weak such that reduced or no toxic effects result from the other undesired cell types. This can be achieved, for example, by selection of binding proteins having differing affinities or causing different Eₘₐₓ for their target receptors as compared to the affinity of a natural cytokine for the same receptors. Because different cell types respond to the binding of ligands to its cognate receptor with different sensitivity, by modulating the affinity of the ligand for the receptor compared to natural cytokine binding facilitates the stimulation of desired activities while reducing undesired activities on non-target cells. To measure downstream signaling activity, a number of methods are available. For example, in some embodiments, one can measure JAK/STAT signaling by the presence of phosphorylated receptors and/or phosphorylated STATs. In other embodiments, the expression of one or more downstream genes, whose expression levels can be affected by the level of downstream signaling caused by the binding protein, can also be measured.

[0028] In other embodiments, the binding proteins described herein provide novel signaling including, but not limited to, by bringing two receptors into proximity that generally do not interact to a significant or measurable degree under natural conditions, or signaling in specific target cell types, by binding to unnatural cytokine receptor pairs. As an example of the latter, one can obtain beneficial signaling caused by binding to the interferon γ receptor 1 (IFNγR1) or IL28Rα and a second receptor that is uniquely or preferentially expressed on myeloid or T-cells, while avoiding or reducing binding of the same receptors (e.g., IFNγR1 or IL28Rα) expressed in other cells in a human by contacting the target cells with a binding protein that comprises a first domain that specifically binds to IFNγR1 or IL28Rα and a second domain that specifically binds to a receptor uniquely or preferentially expressed on myeloid or T-cells, thereby targeting activation of IFNγR1 or IL28Rα by targeting the binding protein to these target cells (myeloid or T-cells) and limiting binding to other cells. The various receptor binding proteins described herein can be designed and tailored to bind to specific receptors, or domains or subunits thereof, that are highly expressed on the cell surface of different cell types. By binding two separate receptors, these receptor binding proteins provide a way to selectively activate or inhibit specific cell types that provide therapeutic and/or prophylactic activity useful in the treatment and/or prevention of diseases such as neoplastic diseases, such as cancer, and infectious diseases.

### II. Definitions

[0029] As used herein, the term “antibody” refers collectively to: (a) glycosylated and non-glycosylated immunoglobulins (including but not limited to mammalian immunoglobulin classes IgG1, IgG2, IgG3 and IgG4) that specifically binds to target molecule and (b) immunoglobulin derivatives including but not limited to IgG(1-4)deltaC_{H}2, F(ab′)₂, Fab, ScFv, V_{H}, V_{L}, tetrabodies, triabodies, diabodies, dsFv, F(ab′)₃, scFv-Fc and (scFv)₂ that competes with the immunoglobulin from which it was derived for binding to the target molecule. The term antibody is not restricted to immunoglobulins derived from any particular mammalian species and includes murine, human, equine, and camelids antibodies (e.g., human antibodies).

[0030] The term antibody also includes so called “single-domain antibodies” or “sdAbs,” as well as “heavy chain antibodies” or “V_{H}Hs,” which are further defined herein. V_{H}Hs can be obtained from immunization of camelids (including camels, llamas, and alpacas (see, e.g., Hamers-Casterman, et al. (1993) Nature 363:446-448) or by screening libraries (e.g., phage libraries) constructed in V_{H}H frameworks. Antibodies having a given specificity may also be derived from non-mammalian sources such as V_{H}Hs obtained from immunization of cartilaginous fishes including, but not limited to, sharks. The term “antibody” encompasses antibodies isolatable from natural sources or from animals following immunization with an antigen and as well as engineered antibodies including monoclonal antibodies, bispecific antibodies, trispecific, chimeric antibodies, humanized antibodies, human antibodies, CDR-grafted, veneered, or deimmunized (e.g., to remove T-cell epitopes) antibodies. The term “human antibody” includes antibodies obtained from human beings as well as antibodies obtained from transgenic mammals comprising human immunoglobulin genes such that, upon stimulation with an antigen the transgenic animal produces antibodies comprising amino acid sequences characteristic of antibodies produced by human beings.

[0031] The term antibody includes both the parent antibody and its derivatives such as affinity matured, veneered, CDR grafted, humanized, camelized (in the case of V_{H}Hs), or binding molecules comprising binding domains of antibodies (e.g., CDRs) in non-immunoglobulin scaffolds.

[0032] The term “antibody” should not be construed as limited to any particular means of synthesis and includes naturally occurring antibodies isolatable from natural sources and as well as engineered antibodies molecules that are prepared by “recombinant” means including antibodies isolated from transgenic animals that are transgenic for human immunoglobulin genes or a hybridoma prepared therefrom, antibodies isolated from a host cell transformed with a nucleic acid construct that results in expression of an antibody, antibodies isolated from a combinatorial antibody library including phage display libraries. In one embodiment, an “antibody” is a mammalian immunoglobulin. In some embodiments, the antibody is a “full length antibody” comprising variable and constant domains providing binding and effector functions.

[0033] The term antibody includes antibody conjugates comprising modifications to prolong duration of action such as fusion proteins or conjugation to polymers (e.g., PEGylated).

[0034] As used herein, the term “binding protein” refers to a protein that can bind to one or more cell surface receptors or domains or subunits thereof. In some embodiments, a binding protein specifically binds to two different receptors (or domains or subunits thereof) such that the receptors (or domains or subunits) are maintained in proximity to each other such that the receptors (or domains or subunits), including domains thereof (e.g., intracellular domains) interact with each other and result in downstream signaling.

[0035] As used herein, the term “CDR” or “complementarity determining region” is intended to mean the non-contiguous antigen combining sites found within the variable region of both heavy and light chain immunoglobulin polypeptides. CDRs have been described by Kabat et al., J. Biol. Chem. 252:6609-6616 (1977); Kabat et al., U.S. Dept. of Health and Human Services, “Sequences of proteins of immunological interest” (1991) (also referred to herein as Kabat 1991); by Chothia et al., J Mol. Biol. 196:901-917 (1987) (also referred to herein as Chothia 1987); and MacCallum et al., J. Mol. Biol. 262:732-745 (1996), where the definitions include overlapping or subsets of amino acid residues when compared against each other. Nevertheless, application of either definition to refer to a CDR of an antibody or grafted antibodies or variants thereof is intended to be within the scope of the term as defined and used herein. For purposes of the present disclosure, unless otherwise specifically identified, the positioning of CDRs2 and 3 in the variable region of an antibody follows Kabat numbering or simply, “Kabat.” The positioning of CDR1 in the variable region of an antibody follows a hybrid of Kabat and Chothia numbering schemes.

[0036] As used herein, the term “conservative amino acid substitution” refers to an amino acid replacement that changes a given amino acid to a different amino acid with similar biochemical properties (e.g., charge, hydrophobicity, and size). For example, the amino acids in each of the following groups can be considered as conservative amino acids of each other: (1) hydrophobic amino acids: alanine, isoleucine, leucine, tryptophan, phenylalanine, valine, proline, and glycine; (2) polar amino acids: glutamine, asparagine, histidine, serine, threonine, tyrosine, methionine, and cysteine; (3) basic amino acids: lysine and arginine; and (4) acidic amino acids: aspartic acid and glutamic acid.

[0037] As used herein, the term “interferon λ receptor” or “IFNλR” refers to a heterodimeric receptor formed by IL10Rβ receptor and IL28 receptor α (IL28Rα) and bound by the ligand IFNλ. Subunit IL28Rα is also referred to as IFNLR1 (IFNλ receptor 1). The human sequence of IL10Rβ is listed as UniProt ID NO. Q08334. The human sequence of IL28Rα is listed as UniProt ID NO. Q8IU57.

[0038] As used herein, the term “interferon γ receptor 1” or “IFNγR1” refers to a subunit of the heterodimeric IFNγR that is formed by subunit IFNγR1 and subunit IFNγR2 and bound by the ligand IFNγ. The amino acid sequence of the human IFNγR1 polypeptide is known and listed as UniProt ID NO. P15260.

[0039] As used herein, the term “interleukin 12 receptor” or “IL12R” refers to a heterodimeric receptor formed by subunit IL12R β1 (IL12Rβ1) and subunit IL12R β2 (IL12Rβ2) and bound by its cognate ligand IL12. The amino acid sequence of human IL12Rβ1 is known and listed as UniProt ID NO. P42701. The amino acid sequence of human IL12Rβ2 is known and listed as UniProt ID NO. Q99665.

[0040] As used herein, the term “interleukin 27 receptor” or “IL27R” refers to a heterodimeric receptor formed by subunits IL27Rα (IL27Rα) and glycoprotein 130 (gp130) and bound by the ligand IL27. The human sequence of IL27Rα is listed as UniProt ID NO. Q6UWB1. The human sequence of gp130 is listed as UniProt ID NO. Q13514.

[0041] As used herein, the term “interleukin 10 receptor” or “IL10R” refers to a tetrameric receptor formed by two IL10R α subunits (IL10Rα) and two IL10R β subunits (IL10Rβ) and bound by the ligand IL10. The amino acid sequence of human IL10Rα is listed as UniProt ID NO. Q13651. The amino acid sequence of human IL10Rβ is listed as UniProt ID NO. Q08334.

[0042] As used herein, the term “interleukin 2 receptor γ” or “IL2Rγ” refers to the γ subunit of the trimeric IL2R. IL2Rγ is also known as CD132. The amino acid sequence of human IL2Rγ is listed as UniProt ID NO. P31785.

[0043] As used herein, the term “linker” refers to a linkage between two elements, e.g., protein domains. A linker can be a covalent bond or a peptide linker. The term “bond” refers to a chemical bond, e.g., an amide bond or a disulfide bond, or any kind of bond created from a chemical reaction, e.g., chemical conjugation. The term “peptide linker” refers to an amino acid or polypeptide that may be employed to link two protein domains to provide space and/or flexibility between the two protein domains.

[0044] As used herein, the term “multimerization” refers to two or more cell surface receptors, or domains or subunits thereof, being brought in close proximity to each other such that the receptors, or domains or subunits thereof, can interact with each other and cause downstream signaling.

[0045] As used herein, the term “proximity” refers to the spatial proximity or physical distance between two cell surface receptors, or domains or subunits thereof, after a binding protein described herein binds to the two cell surface receptors, or domains or subunits thereof. In some embodiments, after the binding protein binds to the cell surface receptors, or domains or subunits thereof, the spatial proximity between the cell surface receptors, or domains or subunits thereof, can be, e.g., less than about 500 angstroms, such as e.g., a distance of about 5 angstroms to about 500 angstroms. In some embodiments, the spatial proximity amounts to less than about 5 angstroms, less than about 20 angstroms, less than about 50 angstroms, less than about 75 angstroms, less than about 100 angstroms, less than about 150 angstroms, less than about 250 angstroms, less than about 300 angstroms, less than about 350 angstroms, less than about 400 angstroms, less than about 450 angstroms, or less than about 500 angstroms. In some embodiments, the spatial proximity amounts to less than about 100 angstroms. In some embodiments, the spatial proximity amounts to less than about 50 angstroms. In some embodiments, the spatial proximity amounts to less than about 20 angstroms. In some embodiments, the spatial proximity amounts to less than about 10 angstroms. In some embodiments, the spatial proximity ranges from about 10 to 100 angstroms, from about 50 to 150 angstroms, from about 100 to 200 angstroms, from about 150 to 250 angstroms, from about 200 to 300 angstroms, from about 250 to 350 angstroms, from about 300 to 400 angstroms, from about 350 to 450 angstroms, or about 400 to 500 angstroms. In some embodiments, the spatial proximity amounts to less than about 250 angstroms, alternatively less than about 200 angstroms, alternatively less than about 150 angstroms, alternatively less than about 120 angstroms, alternatively less than about 100 angstroms, alternatively less than about 80 angstroms, alternatively less than about 70 angstroms, or alternatively less than about 50 angstroms.

[0046] As used herein, the term “downstream signaling” refers to the cellular signaling process that is caused by the interaction of two or more cell surface receptors that are brought into proximity of each other.

[0047] As used herein, the term “percent (%) sequence identity” used in the context of nucleic acids or polypeptides, refers to a sequence that has at least 50% sequence identity with a reference sequence. Alternatively, percent sequence identity can be any integer from 50% to 100%. In some embodiments, a sequence has at least 50%, 55%, 60%, 65%, 70%, 75%, 80%, 85%, 90%, 91%, 92%, 93%, 94%, 95%, 96%, 97%, 98%, or 99% sequence identity to the reference sequence as determined with BLAST using standard parameters, as described below.

[0048] For sequence comparison, typically one sequence acts as a reference sequence, to which test sequences are compared. When using a sequence comparison algorithm, test and reference sequences are entered into a computer, subsequence coordinates are designated, if necessary, and sequence algorithm program parameters are designated. Default program parameters can be used, or alternative parameters can be designated. The sequence comparison algorithm then calculates the percent sequence identities for the test sequences relative to the reference sequence, based on the program parameters.

[0049] A comparison window includes reference to a segment of any one of the number of contiguous positions, e.g., a segment of at least 10 residues. In some embodiments, the comparison window has from 10 to 600 residues, e.g., about 10 to about 30 residues, about 10 to about 20 residues, about 50 to about 200 residues, or about 100 to about 150 residues, in which a sequence may be compared to a reference sequence of the same number of contiguous positions after the two sequences are optimally aligned.

[0050] Algorithms that are suitable for determining percent sequence identity and sequence similarity are the BLAST and BLAST 2.0 algorithms, which are described in Altschul et al. (1990) J Mol. Biol. 215: 403-410 and Altschul et al. (1977) Nucleic Acids Res. 25: 3389-3402, respectively. Software for performing BLAST analyses is publicly available through the National Center for Biotechnology Information (NCBI) web site. The algorithm involves first identifying high scoring sequence pairs (HSPs) by identifying short words of length W in the query sequence, which either match or satisfy some positive-valued threshold score T when aligned with a word of the same length in a database sequence. T is referred to as the neighborhood word score threshold (Altschul et al, supra). These initial neighborhood word hits act as seeds for initiating searches to find longer HSPs containing them. The word hits are then extended in both directions along each sequence for as far as the cumulative alignment score can be increased. Cumulative scores are calculated using, for nucleotide sequences, the parameters M (reward score for a pair of matching residues; always >0) and N (penalty score for mismatching residues; always <0). For amino acid sequences, a scoring matrix is used to calculate the cumulative score. Extension of the word hits in each direction are halted when: the cumulative alignment score falls off by the quantity X from its maximum achieved value; the cumulative score goes to zero or below, due to the accumulation of one or more negative-scoring residue alignments; or the end of either sequence is reached. The BLAST algorithm parameters W, T, and X determine the sensitivity and speed of the alignment. The BLASTN program (for nucleotide sequences) uses as defaults a word size (W) of 28, an expectation (E) of 10, M=1, N=−2, and a comparison of both strands. For amino acid sequences, the BLASTP program uses as defaults a word size (W) of 3, an expectation (E) of 10, and the BLOSUM62 scoring matrix (see Henikoff & Henikoff, Proc. Natl. Acad. Sci. USA 89:10915 (1989)).

[0051] The BLAST algorithm also performs a statistical analysis of the similarity between two sequences (see, e.g., Karlin & Altschul, Proc. Nat'l. Acad. Sci. USA 90:5873-5787 (1993)). One measure of similarity provided by the BLAST algorithm is the smallest sum probability (P(N)), which provides an indication of the probability by which a match between two nucleotide or amino acid sequences would occur by chance. For example, an amino acid sequence is considered similar to a reference sequence if the smallest sum probability in a comparison of the test amino acid sequence to the reference amino acid sequence is less than about 0.01, more preferably less than about 10⁻⁵, and most preferably less than about 10⁻²⁰.

[0052] As used herein, the term “single-domain antibody” or “sdAb” refers to an antibody having a single monomeric variable antibody domain. A sdAb is able to bind selectively to a specific antigen. A V_{H}H antibody, further defined below, is an example of a sdAb.

[0053] As used herein, the term “specifically bind” refers to the degree of selectivity or affinity for which one molecule binds to another. In the context of binding pairs (e.g., a binding protein described herein/receptor, a ligand/receptor, antibody/antigen, antibody/ligand, antibody/receptor binding pairs), a first molecule of a binding pair is said to specifically bind to a second molecule of a binding pair when the first molecule of the binding pair does not bind in a significant amount to other components present in the sample. A first molecule of a binding pair is said to specifically bind to a second molecule of a binding pair when the affinity of the first molecule for the second molecule is at least two-fold greater, alternatively at least five times greater, alternatively at least ten times greater, alternatively at least 20-times greater, or alternatively at least 100-times greater than the affinity of the first molecule for other components present in the sample.

[0054] In a particular embodiment, a V_{H}H in a bispecific V_{H}H² binding protein described herein binds to a receptor (e.g., the first receptor or the second receptor of the natural or non-natural receptor pairs) if the equilibrium dissociation constant between the V_{H}H and the receptor is greater than about 10⁶ M, alternatively greater than about 10⁸ M, alternatively greater than about 10¹⁰ M, alternatively greater than about 10¹¹ M, alternatively greater than about 10¹⁰ M, greater than about 10¹² M as determined by, e.g., Scatchard analysis (Munsen, et al. 1980 Analyt. Biochem. 107:220-239). Specific binding may be assessed using techniques known in the art including but not limited to competition ELISA, BIACORE® assays and/or KINEXA® assays.

[0055] As used herein, the term “subject”, “recipient”, “individual”, or “patient”, refers to any mammalian subject for whom diagnosis, treatment, or therapy is desired, particularly humans. These terms can also be used interchangeably herein. “Mammal” for purposes of treatment refers to any animal classified as a mammal, including humans, domestic and farm animals, and zoo, sports, or pet animals, such as dogs, horses, cats, cows, sheep, goats, pigs, etc. In some embodiments, the mammal is a human being.

[0056] The terms “treat”, “treating”, treatment” and the like refer to a course of action (such as administering a binding protein described herein, or a pharmaceutical composition comprising same) initiated with respect to a subject after a disease, disorder or condition, or a symptom thereof, has been diagnosed, observed, or the like in the subject so as to eliminate, reduce, suppress, mitigate, or ameliorate, either temporarily or permanently, at least one of the underlying causes of such disease, disorder, or condition afflicting a subject, or at least one of the symptoms associated with such disease, disorder, or condition. The treatment includes a course of action taken with respect to a subject suffering from a disease where the course of action results in the inhibition (e.g., arrests the development of the disease, disorder or condition or ameliorates one or more symptoms associated therewith) of the disease in the subject.

[0057] As used herein the terms “prevent”, “preventing”, “prevention” and the like refer to a course of action initiated with respect to a subject prior to the onset of a disease, disorder, condition or symptom thereof so as to prevent, suppress, inhibit or reduce, either temporarily or permanently, a subject's risk of developing a disease, disorder, condition or the like (as determined by, for example, the absence of clinical symptoms) or delaying the onset thereof, generally in the context of a subject predisposed due to genetic, experiential or environmental factors to having a particular disease, disorder or condition. In certain instances, the terms “prevent”, “preventing”, “prevention” are also used to refer to the slowing of the progression of a disease, disorder or condition from a present its state to a more deleterious state.

[0058] As used herein, the term “V_{H}H” is a type of sdAb that has a single monomeric heavy chain variable antibody domain. Such antibodies can be found in or produced from Camelid mammals (e.g., camels, llamas) which are naturally devoid of light chains.

[0059] As used herein, the term “V_{H}H²” refers to two V_{H}Hs that are joined together by way of a linker (e.g., a covalent bond or a peptide linker). A “bispecific V_{H}H²” refers to a V_{H}H² that has a first V_{H}H binding to a first receptor, or domain or subunit thereof, and a second V_{H}H binding to a second receptor, or domain or subunit thereof.

### III. Compositions and Methods

[0060] The disclosure describes various receptor binding proteins that bind to either natural cytokine receptor pairs or domains or subunits thereof, or non-natural cytokine receptor pairs or domains or subunits thereof to create signaling diversity not observed with natural receptor pairings. The various receptor binding proteins can be screened for binding to receptor pairs or domains or subunits thereof and for signal transduction in therapeutically relevant cell types.

[0061] Receptor Binding Proteins that Bind to Natural Receptor Pairs

### IL12 Receptor Binding Proteins

[0062] TheIL12 receptor (IL12R) includes subunits IL12Rβ1 and IL12Rβ2. Provided herein is an IL12R binding protein that specifically binds to IL12Rβ1 and IL12Rβ2. In some embodiments, the IL12R binding protein binds to a mammalian cell expressing both IL12Rβ1 and IL12Rβ2. In some embodiments, the IL12R binding protein can be a bispecific V_{H}H² as described below. In other embodiments, the IL12R binding protein can include a first domain that is a V_{H}H and a second domain which can be a fragment of IL12 or, for example, a scFv.

[0063] The IL12R binding protein can be a bispecific V_{H}H² that has a first V_{H}H binding to IL12Rβ1 (an anti-IL12Rβ1 V_{H}H antibody) and a second V_{H}H binding to IL12Rβ2 (an anti-IL12Rβ2 V_{H}H antibody) and causes the dimerization of the two receptor subunits and downstream signaling when bound to a cell expressing IL12Rβ1 and IL12Rβ2, e.g., a natural killer or a T cell (e.g., a CD4⁺ T cells, and/or a CD8⁺ T cell).

[0064] A linker can be used to join the anti-IL12Rβ1 V_{H}H antibody and the anti-IL12Rβ2 V_{H}H antibody. For example, a linker can simply be a covalent bond or a peptide linker. A peptide linker can include between 1 and 50 amino acids (e.g., between 2 and 50, between 5 and 50, between 10 and 50, between 15 and 50, between 20 and 50, between 25 and 50, between 30 and 50, between 35 and 50, between 40 and 50, between 45 and 50, between 2 and 45, between 2 and 40, between 2 and 35, between 2 and 30, between 2 and 25, between 2 and 20, between 2 and 15, between 2 and 10, between 2 and 5 amino acids). A peptide linker joining the anti-IL12Rβ1 V_{H}H antibody and the anti-IL12Rβ2 V_{H}H antibody can be a flexible glycine-serine linker. A linker can also be a chemical linker, such as a synthetic polymer, e.g., a polyethylene glycol (PEG) polymer.

[0065] The anti-IL12Rβ1 V_{H}H antibody can have a sequence having at least 90% (e.g., 91%, 92%, 93%, 94%, 95%, 96%, 97%, 98%, 99%, or 100%) sequence identity to the sequence of any one of SEQ ID NOS:105-111.

[0066] The anti-IL12Rβ2 V_{H}H antibody can have a sequence having at least 90% (e.g., 91%, 92%, 93%, 94%, 95%, 96%, 97%, 98%, 99%, or 100%) sequence identity to the sequence of any one of SEQ ID NOS:58-63.

[0067] The anti-IL12Rβ2 V_{H}H antibody can have a sequence having at least 90% (e.g., 91%, 92%, 93%, 94%, 95%, 96%, 97%, 98%, 99%, or 100%) sequence identity to the sequence of any one of SEQ ID NOS:112-117.

[0068] In some embodiments, an IL12 receptor binding protein described herein can have an anti-IL12Rβ1 V_{H}H, a linker, and an anti-IL12Rβ2 V_{H}H as listed in Table 1 below.

TABLE 1
IL12 Receptor Binding Protein Constructs

| SEQ ID NO of anti- | | SEQ ID NO of anti- | Sequence of IL12 receptor |
|---|---|---|---|
| IL12Rβ1 V_{H}H | SEQ ID NO of | IL12Rβ2 V_{H}H at C- | binding protein |
| at N-terminus | linker | terminus | (SEQ ID NO) |
| 105 | 23 | 112 | 131 |
| 105 | 23 | 113 | 132 |
| 105 | 23 | 114 | 133 |
| 105 | 23 | 115 | 134 |
| 105 | 23 | 116 | 135 |
| 105 | 23 | 117 | 136 |
| 106 | 23 | 112 | 137 |
| 106 | 23 | 113 | 138 |
| 106 | 23 | 114 | 139 |
| 106 | 23 | 115 | 140 |
| 106 | 23 | 116 | 141 |
| 106 | 23 | 117 | 142 |
| 107 | 23 | 112 | 143 |
| 107 | 23 | 113 | 144 |
| 107 | 23 | 114 | 145 |
| 107 | 23 | 115 | 146 |
| 107 | 23 | 116 | 147 |
| 107 | 23 | 117 | 148 |
| 108 | 23 | 112 | 149 |
| 108 | 23 | 113 | 150 |
| 108 | 23 | 114 | 151 |
| 108 | 23 | 115 | 152 |
| 108 | 23 | 116 | 153 |
| 108 | 23 | 117 | 154 |
| 109 | 23 | 112 | 155 |
| 109 | 23 | 113 | 156 |
| 109 | 23 | 114 | 157 |
| 109 | 23 | 115 | 158 |
| 109 | 23 | 116 | 159 |
| 109 | 23 | 117 | 160 |
| 112 | 23 | 105 | 161 |
| 112 | 23 | 106 | 162 |
| 112 | 23 | 107 | 163 |
| 112 | 23 | 108 | 164 |
| 112 | 23 | 109 | 165 |
| 113 | 23 | 105 | 166 |
| 113 | 23 | 106 | 167 |
| 113 | 23 | 107 | 168 |
| 113 | 23 | 108 | 169 |
| 113 | 23 | 109 | 170 |
| 114 | 23 | 105 | 171 |
| 114 | 23 | 106 | 172 |
| 114 | 23 | 107 | 173 |
| 114 | 23 | 108 | 174 |
| 114 | 23 | 109 | 175 |
| 115 | 23 | 105 | 176 |
| 115 | 23 | 106 | 177 |
| 115 | 23 | 107 | 178 |
| 115 | 23 | 108 | 179 |
| 115 | 23 | 109 | 180 |
| 116 | 23 | 105 | 181 |
| 116 | 23 | 106 | 182 |
| 116 | 23 | 107 | 183 |
| 116 | 23 | 108 | 184 |
| 116 | 23 | 109 | 185 |
| 117 | 23 | 105 | 186 |
| 117 | 23 | 106 | 187 |
| 117 | 23 | 107 | 188 |
| 117 | 23 | 108 | 189 |
| 117 | 23 | 109 | 190 |

[0069] In some embodiments, the IL12R binding protein has a reduced Eₘₐₓ compared to the Eₘₐₓ caused by IL12. Eₘₐₓ reflects the maximum response level in a cell type that can be obtained by a ligand (e.g., a binding protein described herein or the native cytokine (e.g., IL12)). In some embodiments, the IL12R binding protein described herein has at least 1% (e.g., between 1% and 100%, between 10% and 100%, between 20% and 100%, between 30% and 100%, between 40% and 100%, between 50% and 100%, between 60% and 100%, between 70% and 100%, between 80% and 100%, between 90% and 100%, between 1% and 90%, between 1% and 80%, between 1% and 70%, between 1% and 60%, between 1% and 50%, between 1% and 40%, between 1% and 30%, between 1% and 20%, or between 1% and 10%) of the Eₘₐₓ caused by IL12. In some embodiments, by varying the linker length of the IL12R binding protein, the Eₘₐₓ of the IL12R binding protein can be changed. The IL12R binding protein can cause Eₘₐₓ in the most desired cell types (e.g., CD8⁺ T cells), and a reduced Eₘₐₓ in other cell types (e.g., natural killer cells). In some embodiments, the Eₘₐₓ in natural killer cells caused by an IL12R binding protein described herein is between 1% and 100% (e.g., between 10% and 100%, between 20% and 100%, between 30% and 100%, between 40% and 100%, between 50% and 100%, between 60% and 100%, between 70% and 100%, between 80% and 100%, between 90% and 100%, between 10% and 90%, between 10% and 80%, between 1% and 70%, between 1% and 60%, between 1% and 50%, between 1% and 40%, between 1% and 30%, between 1% and 20%, or between 1% and 10%) of the Eₘₐₓ in T cells (e.g., CD8⁺ T cells) caused by the IL12R binding protein. In other embodiments, the Eₘₐₓ of the IL12R binding protein described herein is greater (e.g., at least 1%, 5%, 10%, 15%, 20%, 25%, 30%, 35%, 40%, 45%, or 50% greater) than the Eₘₐₓ of the natural ligand, IL12.

[0070] An IL12R binding protein described herein are useful in the treatment of neoplastic diseases, such as cancer (e.g., a solid tumor cancer; e.g., non-small-cell lung carcinoma (NSCLC), renal cell carcinoma (RCC), or melanoma) in a subject in need thereof. The IL12R binding protein binds to and activates natural killer, CD4⁺ T cells, and/or CD8⁺ T cells. The IL12R binding protein can trigger different levels of downstream signaling in different cell types. For example, by varying the length of the linker between the anti-IL12Rβ1 V_{H}H antibody and the anti-IL12Rβ2 V_{H}H antibody in the IL12R binding protein, the IL12R binding protein can cause a higher level of downstream signaling in desired cell types compared to undesired cell types. In some embodiments, by varying the linker length, an IL12R binding protein can cause a higher level of downstream signaling in T cells (e.g., CD8⁺ T cells) compared to the level of downstream signaling in natural killer cells, a cell type that expresses both IL12Rβ1 and IL12Rβ2 receptors but when activated too potently can give rise to toxicities. In other embodiments, different anti-IL12Rβ1 V_{H}H antibodies with different binding affinities and different anti-IL12Rβ2 V_{H}H antibodies with different binding affinities can be combined to make different IL12R binding proteins. Further, the orientation of the two antibodies in the binding protein can also be changed to make a different binding protein (i.e., anti-IL12Rβ1 V_{H}H antibody-linker-anti-IL12Rβ2 V_{H}H antibody, or anti-IL12Rβ2 V_{H}H antibody-linker-anti-IL12Rβ1 V_{H}H antibody). Different IL12R binding proteins can be screened to find the ideal binding protein that causes a higher level of downstream signaling in desired cell types compared to undesired cell types. In some embodiments, IL12R binding proteins can be partial agonists that have different activities on different cell types, e.g., T cells versus natural killer cells. For example, the selective activation of T cells over natural killer cells is desirable to avoid the toxicity associated with IL12 activated natural killer cells. In some embodiments IL12R binding protein is a partial agonist, where the partial agonist activates T cells selectively over NK cells. In some embodiments, the level of downstream signaling in T cells (e.g., CD8⁺ T cells) is at least 1.1, 1.5, 2, 3, 5, or 10 times of the level of downstream signaling in natural killer cells.

### IL27 Receptor Binding Proteins

[0071] The IL27 receptor (IL27R) includes IL27Rα subunit (IL27Rα) and glycoprotein 130 subunit (gp130). Provided herein is an IL27R binding protein that specifically binds to IL27Rα and gp130. In some embodiments, the IL27R binding protein binds to a mammalian cell expressing both IL27Rα and gp130. In some embodiments, the IL27R binding protein can be a bispecific V_{H}H² as described below. In other embodiments, the IL27R binding protein can include a first domain that is a V_{H}H and a second domain which can be a fragment of IL27 or, for example, a scFv.

[0072] The IL27R binding protein can be a bispecific V_{H}H² that has a first V_{H}H binding to IL27Rα (an anti-IL27Rα V_{H}H antibody) and a second V_{H}H binding to gp130 (an anti-gp130 V_{H}H antibody) and causes the dimerization of the two receptor subunits and downstream signaling when bound to a cell expressing IL27Rα and gp130, e.g., a CD8⁺ T cells, a CD4⁺ T cells, and/or a T regulatory (Treg) cell.

[0073] A linker can be used to join the anti-IL27Rα V_{H}H antibody and the anti-gp130 V_{H}H antibody. For example, a linker can simply be a covalent bond or a peptide linker. A peptide linker can include between 1 and 50 amino acids (e.g., between 2 and 50, between 5 and 50, between 10 and 50, between 15 and 50, between 20 and 50, between 25 and 50, between 30 and 50, between 35 and 50, between 40 and 50, between 45 and 50, between 2 and 45, between 2 and 40, between 2 and 35, between 2 and 30, between 2 and 25, between 2 and 20, between 2 and 15, between 2 and 10, between 2 and 5 amino acids). A peptide linker joining the anti-IL27Rα V_{H}H antibody and the anti-gp130 V_{H}H antibody can be a flexible glycine-serine linker. A linker can also be a chemical linker, such as a synthetic polymer, e.g., a polyethylene glycol (PEG) polymer.

[0074] The anti-IL27Rα V_{H}H antibody can have a sequence having at least 90% (e.g., 91%, 92%, 93%, 94%, 95%, 96%, 97%, 98%, 99%, or 100%) sequence identity to the sequence of any one of SEQ ID NOS:70-75.

[0075] The anti-IL27Rα V_{H}H antibody can have a sequence having at least 90% (e.g., 91%, 92%, 93%, 94%, 95%, 96%, 97%, 98%, 99%, or 100%) sequence identity to the sequence of any one of SEQ ID NOS:125-130.

[0076] The anti-gp130 V_{H}H antibody can have a sequence having at least 90% (e.g., 91%, 92%, 93%, 94%, 95%, 96%, 97%, 98%, 99%, or 100%) sequence identity to the sequence of any one of SEQ ID NOS:24-29.

[0077] The anti-gp130 V_{H}H antibody can have a sequence having at least 90% (e.g., 91%, 92%, 93%, 94%, 95%, 96%, 97%, 98%, 99%, or 100%) sequence identity to the sequence of any one of SEQ ID NOS:83-89.

[0078] In some embodiments, the IL27R binding protein has a reduced Eₘₐₓ compared to the Eₘₐₓ caused by IL27. Eₘₐₓ reflects the maximum response level in a cell type that can be obtained by a ligand (e.g., a binding protein described herein or the native cytokine (e.g., IL27)). In some embodiments, the IL27R binding protein described herein has at least 1% (e.g., between 1% and 100%, between 10% and 100%, between 20% and 100%, between 30% and 100%, between 40% and 100%, between 50% and 100%, between 60% and 100%, between 70% and 100%, between 80% and 100%, between 90% and 100%, between 1% and 90%, between 1% and 80%, between 1% and 70%, between 1% and 60%, between 1% and 50%, between 1% and 40%, between 1% and 30%, between 1% and 20%, or between 1% and 10%) of the Eₘₐₓ caused by IL27. In other embodiments, the Eₘₐₓ of the IL27R binding protein described herein is greater (e.g., at least 1%, 5%, 10%, 15%, 20%, 25%, 30%, 35%, 40%, 45%, or 50% greater) than the Eₘₐₓ of the natural ligand, IL27. In some embodiments, by varying the linker length of the IL27R binding protein, the Eₘₐₓ of the IL27R binding protein can be changed. The IL27R binding protein can cause Eₘₐₓ in the most desired cell types, and a reduced Eₘₐₓ in other cell types.

[0079] An IL27R binding protein described herein are useful in the treatment of neoplastic diseases, such as cancer (e.g., a solid tumor cancer; e.g., non-small-cell lung carcinoma (NSCLC), renal cell carcinoma (RCC), or melanoma) and/or infectious diseases (e.g., bacterial infections and viral infections (e.g., viral infections caused by hepatitis C virus (HCV), human papillomavirus (HPV), or human immunodeficiency virus (HIV)) in a subject in need thereof. The IL27R binding protein binds to and activates CD8⁺ T cells, CD4⁺ T cells, and/or T regulatory (Treg) cells. The IL27R binding protein can trigger different levels of downstream signaling in different cell types. For example, by varying the length of the linker between the anti-IL27Rα V_{H}H antibody and the anti-gp130 V_{H}H antibody in the IL27R binding protein, the IL27R binding protein can cause a higher level of downstream signaling in desired cell types compared to undesired cell types. In some embodiments, by varying the linker length, an IL27R binding protein can cause a higher level of downstream signaling in T cells (e.g., CD8+ T cells) compared to the level of downstream signaling in other cells. In other embodiments, different anti-IL27Rα V_{H}H antibodies with different binding affinities and different anti-gp130 V_{H}H antibodies with different binding affinities can be combined to make different IL27R binding proteins. Further, the orientation of the two antibodies in the binding protein can also be changed to make a different binding protein (i.e., anti-IL27Rα V_{H}H antibody-linker-anti-gp130 V_{H}H antibody, or anti-gp130 V_{H}H antibody-linker-anti-IL27Rα V_{H}H antibody). Different IL27R binding proteins can be screened to find the ideal binding protein that causes a higher level of downstream signaling in desired cell types compared to undesired cell types. In some embodiments, the level of downstream signaling in T cells (e.g., CD8⁺ T cells) is at least 1.1, 1.5, 2, 3, 5, or 10 times of the level of downstream signaling in other cells.

[0080] In particular, the IL27R binding protein binds to and activates CD8⁺ T cells. In some embodiments, the IL27R binding protein binds to and activates CXCR5⁺ CD8⁺ T cells. It is known that IL27 can promote and sustain a rapid division of memory-like CXCR5⁺ CD8⁺ T cells during, for example, viral infection. The CXCR5⁺ CD8⁺ T cells can sustain T cell responses during persistent infection or cancer and drive the proliferative burst of CD8⁺ T cells after anti-PD1 treatment. Accordingly, an IL27R binding protein described herein is useful to sustain and augment self-renewing T cells in chronic infections and neoplastic diseases, such as cancer.

### IL10 Receptor Binding Proteins

[0081] The IL10 receptor (IL10R) includes IL10Rα subunit (IL10Rα) and IL10Rβ subunit (IL10Rβ). Provided herein is an IL10R binding protein that specifically binds to IL10Rα and IL10Rβ. In some embodiments, the IL10R binding protein binds to a mammalian cell expressing both IL10Rα and IL10Rβ. In some embodiments, the IL10R binding protein can be a bispecific V_{H}H² as described below. In other embodiments, the IL10R binding protein can include a first domain that is a V_{H}H and a second domain which can be a fragment of IL10 or, for example, a scFv.

[0082] The IL10R binding protein can be a bispecific V_{H}H² that has a first V_{H}H binding to IL10Rα (an anti-IL10Rα V_{H}H antibody) and a second V_{H}H binding to IL10Rβ (an anti-IL10Rβ V_{H}H antibody) and causes the dimerization of the two receptor subunits and downstream signaling when bound to a cell expressing IL10Rα and IL10Rβ, e.g., a T cell (e.g., a CD8⁺ T cell or a CD4⁺ T cell), a macrophage, and/or a Treg cell.

[0083] A linker can be used to join the anti-IL10Rα V_{H}H antibody and the anti-IL10Rβ V_{H}H antibody. For example, a linker can simply be a covalent bond or a peptide linker. A peptide linker can include between 1 and 50 amino acids (e.g., between 2 and 50, between 5 and 50, between 10 and 50, between 15 and 50, between 20 and 50, between 25 and 50, between 30 and 50, between 35 and 50, between 40 and 50, between 45 and 50, between 2 and 45, between 2 and 40, between 2 and 35, between 2 and 30, between 2 and 25, between 2 and 20, between 2 and 15, between 2 and 10, between 2 and 5 amino acids). A peptide linker joining the anti-IL10Rα V_{H}H antibody and the anti-IL10Rβ V_{H}H antibody can be a flexible glycine-serine linker. A linker can also be a chemical linker, such as a synthetic polymer, e.g., a polyethylene glycol (PEG) polymer.

[0084] The anti-IL10Rα V_{H}H antibody can have a sequence having at least 90% (e.g., 91%, 92%, 93%, 94%, 95%, 96%, 97%, 98%, 99%, or 100%) sequence identity to the sequence of any one of SEQ ID NOS:44-50.

[0085] The anti-IL10Rα V_{H}H antibody can have a sequence comprising: a CDR1 having at least 90% (e.g., 91%, 92%, 93%, 94%, 95%, 96%, 97%, 98%, 99%, or 100%) sequence identity, or having 0, 1, 2, or 3 amino acid changes, optionally conservative amino acid changes relative, to the sequence of any one of SEQ ID NOS: 388, 391, 394, 397, 400, 403, and 406; a CDR2 having at least 90% (e.g., 91%, 92%, 93%, 94%, 95%, 96%, 97%, 98%, 99%, or 100%) sequence identity, or having 0, 1, 2, or 3 amino acid changes, optionally conservative amino acid changes relative, to the sequence of any one of SEQ ID NOS: 389, 392, 395, 398, 401, 404, and 407; and a CDR3 having at least 90% (e.g., 91%, 92%, 93%, 94%, 95%, 96%, 97%, 98%, 99%, or 100%) sequence identity, or having 0, 1, 2, or 3 amino acid changes, optionally conservative amino acid changes relative, to the sequence of any one of SEQ ID NOS: 390, 393, 396, 399, 402, 405, and 408.

[0086] The anti-IL10Rβ V_{H}H antibody can have a sequence having at least 90% (e.g., 91%, 92%, 93%, 94%, 95%, 96%, 97%, 98%, 99%, or 100%) sequence identity to the sequence of any one of SEQ ID NOS:51-57.

[0087] The anti-IL10Rβ V_{H}H antibody can have a sequence comprising: a CDR1 having at least 90% (e.g., 91%, 92%, 93%, 94%, 95%, 96%, 97%, 98%, 99%, or 100%) sequence identity, or having 0, 1, 2, or 3 amino acid changes, optionally conservative amino acid changes relative, to the sequence of any one of SEQ ID NOS: 409, 412, 415, 418, 421, 424, and 427; a CDR2 having at least 90% (e.g., 91%, 92%, 93%, 94%, 95%, 96%, 97%, 98%, 99%, or 100%) sequence identity, or having 0, 1, 2, or 3 amino acid changes, optionally conservative amino acid changes relative, to the sequence of any one of SEQ ID NOS: 410, 413, 416, 419, 422, 425, and 428; and a CDR3 having at least 90% (e.g., 91%, 92%, 93%, 94%, 95%, 96%, 97%, 98%, 99%, or 100%) sequence identity, or having 0, 1, 2, or 3 amino acid changes, optionally conservative amino acid changes relative, to the sequence of any one of SEQ ID NOS: 411, 414, 417, 420, 423, 426, and 429.

[0088] The anti-IL10Rβ V_{H}H antibody can have a sequence having at least 90% (e.g., 91%, 92%, 93%, 94%, 95%, 96%, 97%, 98%, 99%, or 100%) sequence identity to the sequence of any one of SEQ ID NOS:99-104.

[0089] In some embodiments, the IL10R binding protein has a reduced Eₘₐₓ compared to the Eₘₐₓ caused by IL10. Eₘₐₓ reflects the maximum response level in a cell type that can be obtained by a ligand (e.g., a binding protein described herein or the native cytokine (e.g., IL10)). In some embodiments, the IL10R binding protein described herein has at least 1% (e.g., between 1% and 100%, between 10% and 100%, between 20% and 100%, between 30% and 100%, between 40% and 100%, between 50% and 100%, between 60% and 100%, between 70% and 100%, between 80% and 100%, between 90% and 100%, between 1% and 90%, between 1% and 80%, between 1% and 70%, between 1% and 60%, between 1% and 50%, between 1% and 40%, between 1% and 30%, between 1% and 20%, or between 1% and 10%) of the Eₘₐₓ caused by IL10. In some embodiments, by varying the linker length of the IL10R binding protein, the Eₘₐₓ of the IL10R binding protein can be changed. The IL10R binding protein can cause Eₘₐₓ in the most desired cell types (e.g., CD8⁺ T cells), and a reduced Eₘₐₓ in other cell types (e.g., marcophages). In some embodiments, the Eₘₐₓ in macrophages caused by an IL10R binding protein described herein is between 1% and 100% (e.g., between 10% and 100%, between 20% and 100%, between 30% and 100%, between 40% and 100%, between 50% and 100%, between 60% and 100%, between 70% and 100%, between 80% and 100%, between 90% and 100%, between 1% and 90%, between 1% and 80%, between 1% and 70%, between 1% and 60%, between 1% and 50%, between 1% and 40%, between 1% and 30%, between 1% and 20%, or between 1% and 10%) of the Eₘₐₓ in T cells (e.g., CD8⁺ T cells) caused by the IL10R binding protein. In other embodiments, the Eₘₐₓ of the IL10R binding protein described herein is greater (e.g., at least 1%, 5%, 10%, 15%, 20%, 25%, 30%, 35%, 40%, 45%, or 50% greater) than the Eₘₐₓ of the natural ligand, IL10.

[0090] In some embodiments, the present disclosure provides examples of IL10 receptor binding proteins comprising anti-IL10Rα V_{H}H, an optional linker, and an anti-IL10Rβ2 V_{H}H. In some embodiments, the N-terminal V_{H}H of the IL-10 binding molecule is anti-IL10Rα V_{H}H and the C-terminal V_{H}H of the IL-10 receptor binding protein is anti-IL10Rβ V_{H}H, optionally comprising a linker between the V_{H}Hs. In some embodiments, the N-terminal V_{H}H of the IL-10 receptor binding protein is an anti-IL10Rβ V_{H}H and the C-terminal V_{H}H of the IL-10 receptor binding protein is anti-IL10Rα V_{H}H, optionally comprising a linker between the V_{H}H. In some embodiments, the IL-10 receptor binding protein may provide a purification handle such as but not limited to the Ala-Ser-His-His-His-His-His-His (“ASH6”, SEQ ID NO:430) purification handle to facilitate purification of the receptor binding protein by chelating peptide immobilized metal affinity chromatography (“CP-IMAC, as described in U.S. Pat. No. 4,569,794).

[0091] As series of ninety-eight IL10 receptor binding proteins comprising anti-IL10Rα V_{H}H, a linker, and an anti-IL10Rβ2 V_{H}H and an ASH6 (SEQ ID NO: 430) purification handle (SEQ ID NOs:192-289) were prepared in substantial accordance with Examples 1-4 herein and evaluated for IL-10 activity in substantial accordance with Examples 5 and 6 herein. The arrangement of V_{H}H, linker and purification handle elements of these ninety-eight IL-10 receptor binding proteins is provided in Table 2 below.

TABLE 2
IL10 Receptor Binding Proteins

| | | | | C-terminal |
|---|---|---|---|---|
| IL10 Receptor | N-terminal | | C-terminal | purification |
| Binding Protein | anti-IL10 V_{H}H | Linker | anti-IL10 V_{H}H | handle |
| (SEQ ID NO:) | (SEQ ID NO:) | (SEQ ID NO:) | (SEQ ID NO:) | (SEQ ID NO:) |
| 192 | 44 | 23 | 51 | 430 |
| 193 | 44 | 23 | 52 | 430 |
| 194 | 44 | 23 | 53 | 430 |
| 195 | 44 | 23 | 54 | 430 |
| 196 | 44 | 23 | 55 | 430 |
| 197 | 44 | 23 | 56 | 430 |
| 198 | 44 | 23 | 57 | 430 |
| 199 | 45 | 23 | 51 | 430 |
| 200 | 45 | 23 | 52 | 430 |
| 201 | 45 | 23 | 53 | 430 |
| 202 | 45 | 23 | 54 | 430 |
| 203 | 45 | 23 | 55 | 430 |
| 204 | 45 | 23 | 56 | 430 |
| 205 | 45 | 23 | 57 | 430 |
| 206 | 46 | 23 | 51 | 430 |
| 207 | 46 | 23 | 52 | 430 |
| 208 | 46 | 23 | 53 | 430 |
| 209 | 46 | 23 | 54 | 430 |
| 210 | 46 | 23 | 55 | 430 |
| 211 | 46 | 23 | 56 | 430 |
| 212 | 46 | 23 | 57 | 430 |
| 213 | 47 | 23 | 51 | 430 |
| 214 | 47 | 23 | 52 | 430 |
| 215 | 47 | 23 | 53 | 430 |
| 216 | 47 | 23 | 54 | 430 |
| 217 | 47 | 23 | 55 | 430 |
| 218 | 47 | 23 | 56 | 430 |
| 219 | 47 | 23 | 57 | 430 |
| 220 | 48 | 23 | 51 | 430 |
| 221 | 48 | 23 | 52 | 430 |
| 222 | 48 | 24 | 53 | 430 |
| 223 | 48 | 24 | 54 | 430 |
| 224 | 48 | 24 | 55 | 430 |
| 225 | 48 | 24 | 56 | 430 |
| 226 | 48 | 24 | 57 | 430 |
| 227 | 49 | 24 | 51 | 430 |
| 228 | 49 | 24 | 52 | 430 |
| 229 | 49 | 24 | 53 | 430 |
| 230 | 49 | 24 | 54 | 430 |
| 231 | 49 | 24 | 55 | 430 |
| 232 | 49 | 24 | 56 | 430 |
| 233 | 49 | 24 | 57 | 430 |
| 234 | 50 | 24 | 51 | 430 |
| 235 | 50 | 24 | 52 | 430 |
| 236 | 50 | 24 | 53 | 430 |
| 237 | 50 | 24 | 54 | 430 |
| 238 | 50 | 24 | 55 | 430 |
| 239 | 50 | 24 | 56 | 430 |
| 240 | 50 | 24 | 57 | 430 |
| 241 | 51 | 24 | 44 | 430 |
| 242 | 51 | 24 | 45 | 430 |
| 243 | 51 | 24 | 46 | 430 |
| 244 | 51 | 24 | 47 | 430 |
| 245 | 51 | 24 | 48 | 430 |
| 246 | 51 | 24 | 49 | 430 |
| 247 | 51 | 24 | 50 | 430 |
| 248 | 52 | 24 | 44 | 430 |
| 249 | 52 | 24 | 45 | 430 |
| 250 | 52 | 24 | 46 | 430 |
| 251 | 52 | 24 | 47 | 430 |
| 252 | 52 | 24 | 48 | 430 |
| 253 | 52 | 24 | 49 | 430 |
| 254 | 52 | 24 | 50 | 430 |
| 255 | 53 | 24 | 44 | 430 |
| 256 | 53 | 24 | 45 | 430 |
| 257 | 53 | 24 | 46 | 430 |
| 258 | 53 | 24 | 47 | 430 |
| 259 | 53 | 24 | 48 | 430 |
| 260 | 53 | 24 | 49 | 430 |
| 261 | 53 | 24 | 50 | 430 |
| 262 | 54 | 24 | 44 | 430 |
| 263 | 54 | 24 | 45 | 430 |
| 264 | 54 | 24 | 46 | 430 |
| 265 | 54 | 24 | 47 | 430 |
| 266 | 54 | 24 | 48 | 430 |
| 267 | 54 | 24 | 49 | 430 |
| 268 | 54 | 24 | 50 | 430 |
| 269 | 55 | 24 | 44 | 430 |
| 270 | 55 | 24 | 45 | 430 |
| 271 | 55 | 24 | 46 | 430 |
| 272 | 55 | 24 | 47 | 430 |
| 273 | 55 | 24 | 48 | 430 |
| 274 | 55 | 24 | 49 | 430 |
| 275 | 55 | 24 | 50 | 430 |
| 276 | 56 | 24 | 44 | 430 |
| 277 | 56 | 24 | 45 | 430 |
| 278 | 56 | 24 | 46 | 430 |
| 279 | 56 | 24 | 47 | 430 |
| 280 | 56 | 24 | 48 | 430 |
| 281 | 56 | 24 | 49 | 430 |
| 282 | 56 | 24 | 50 | 430 |
| 283 | 57 | 24 | 44 | 430 |
| 284 | 57 | 24 | 45 | 430 |
| 285 | 57 | 24 | 46 | 430 |
| 286 | 57 | 24 | 47 | 430 |
| 287 | 57 | 24 | 48 | 430 |
| 288 | 57 | 24 | 49 | 430 |
| 289 | 57 | 24 | 50 | 430 |

[0092] As provided in more detail in the Example 3 herein, nucleic acid sequences encoding SEQ ID Nos: 192-289 were synthesized as SEQ ID Nos: 290-387 respectively and were inserted into a recombinant expression vector and expressed in HEK293 cells in 24 well place format and purified in substantial accordance with Example 4. The supernatants containing the IL-10 receptor binding proteins of SEQ ID Nos: 192-298 were evaluated for activity with unstimulated and wild-type human IL-10 as controls in substantial accordance with Examples 5 and 6 herein. The results of these experiments are provided in Table 3 below.

TABLE 3
IL10 Receptor Binding Protein Activity

| TestArticle | Abs 630 | Abs 630 |
|---|---|---|
| (SEQ ID NO:) | (25 nM) | (100 nM) |
| Unstimulated | 0.58 | 0.59 |
| WildType hIL10 | 2.08 | 2.04 |
| 192 | 0.49 | 0.39 |
| 193 | 0.45 | 0.36 |
| 194 | 0.49 | 0.38 |
| 195 | 1.85 | 1.13 |
| 196 | 0.49 | 0.39 |
| 197 | 0.44 | 0.34 |
| 198 | 1.38 | 0.40 |
| 199 | 1.77 | 1.02 |
| 200 | 1.52 | 0.67 |
| 201 | 0.54 | 0.46 |
| 202 | 0.49 | 0.39 |
| 203 | 0.75 | 0.53 |
| 204 | 0.53 | 0.41 |
| 205 | 0.46 | 0.37 |
| 206 | 1.41 | 0.73 |
| 207 | 1.93 | 1.65 |
| 208 | 0.47 | 0.38 |
| 209 | 0.52 | 0.41 |
| 210 | 0.46 | 0.37 |
| 211 | 0.51 | 0.36 |
| 212 | 0.46 | 0.36 |
| 213 | 1.19 | 1.00 |
| 214 | 1.61 | 1.18 |
| 215 | 0.49 | 0.39 |
| 216 | 0.49 | 0.37 |
| 217 | 0.66 | 0.69 |
| 218 | 0.44 | 0.36 |
| 219 | 0.48 | 0.39 |
| 220 | 0.45 | 0.34 |
| 221 | 0.48 | 0.39 |
| 222 | 0.46 | 0.39 |
| 223 | 0.90 | 0.51 |
| 224 | 0.50 | 0.44 |
| 225 | 0.48 | 0.39 |
| 226 | 0.49 | 0.37 |
| 227 | 1.73 | 0.59 |
| 228 | 0.78 | 0.47 |
| 229 | 0.54 | 0.43 |
| 230 | 0.49 | 0.39 |
| 231 | 0.72 | 0.46 |
| 232 | 0.54 | 0.38 |
| 233 | 0.46 | 0.36 |
| 234 | 0.84 | 0.38 |
| 235 | 0.47 | 0.37 |
| 236 | 2.08 | 2.11 |
| 237 | 2.05 | 1.91 |
| 238 | 1.98 | 2.09 |
| 239 | 1.92 | 1.93 |
| 240 | 1.96 | 2.06 |
| 241 | 0.59 | 0.35 |
| 242 | 0.69 | 0.49 |
| 243 | 0.44 | 0.34 |
| 244 | 0.48 | 0.39 |
| 245 | 0.45 | 0.37 |
| 246 | 0.51 | 0.44 |
| 247 | 0.48 | 0.40 |
| 248 | 0.48 | 0.39 |
| 249 | 0.47 | 0.39 |
| 250 | 0.49 | 0.42 |
| 251 | 0.51 | 0.41 |
| 252 | 0.48 | 0.39 |
| 253 | 0.45 | 0.38 |
| 254 | 0.50 | 0.45 |
| 255 | 0.47 | 0.36 |
| 256 | 0.54 | 0.41 |
| 257 | 0.46 | 0.40 |
| 258 | 0.46 | 0.41 |
| 259 | 0.64 | 0.38 |
| 260 | 0.61 | 0.44 |
| 261 | 0.49 | 0.42 |
| 262 | 0.47 | 0.56 |
| 263 | 0.52 | 0.54 |
| 264 | 0.44 | 0.34 |
| 265 | 0.48 | 0.39 |
| 266 | 0.45 | 0.36 |
| 267 | 0.50 | 0.41 |
| 268 | 0.47 | 0.36 |
| 269 | 0.49 | 0.54 |
| 270 | 1.43 | 1.14 |
| 271 | 0.50 | 0.44 |
| 272 | 0.54 | 0.45 |
| 273 | 0.49 | 0.40 |
| 274 | 0.51 | 0.41 |
| 275 | 0.49 | 0.42 |
| 276 | 0.46 | 0.51 |
| 277 | 0.60 | 0.48 |
| 278 | 0.45 | 0.36 |
| 279 | 0.46 | 0.37 |
| 280 | 0.50 | 0.43 |
| 281 | 0.52 | 0.44 |
| 282 | 0.43 | 0.35 |
| 283 | 0.45 | 0.35 |
| 284 | 0.46 | 0.36 |
| 285 | 0.46 | 0.38 |
| 286 | 0.43 | 0.35 |
| 287 | 0.43 | 0.34 |
| 288 | 0.54 | 0.65 |
| 289 | 0.56 | 0.61 |
| Unstimulated | 0.58 | 0.59 |
| WildType hIL10 | 2.08 | 2.04 |
| 192 | 0.49 | 0.39 |
| 193 | 0.45 | 0.36 |
| 194 | 0.49 | 0.38 |
| 195 | 1.85 | 1.13 |
| 196 | 0.49 | 0.39 |
| 197 | 0.44 | 0.34 |
| 198 | 1.38 | 0.40 |
| 199 | 1.77 | 1.02 |
| 200 | 1.52 | 0.67 |
| 201 | 0.54 | 0.46 |
| 202 | 0.49 | 0.39 |
| 203 | 0.75 | 0.53 |
| 204 | 0.53 | 0.41 |
| 205 | 0.46 | 0.37 |
| 206 | 1.41 | 0.73 |
| 207 | 1.93 | 1.65 |
| 208 | 0.47 | 0.38 |
| 209 | 0.52 | 0.41 |
| 210 | 0.46 | 0.37 |
| 211 | 0.51 | 0.36 |
| 212 | 0.46 | 0.36 |
| 213 | 1.19 | 1.00 |
| 214 | 1.61 | 1.18 |
| 215 | 0.49 | 0.39 |
| 216 | 0.49 | 0.37 |
| 217 | 0.66 | 0.69 |
| 218 | 0.44 | 0.36 |
| 219 | 0.48 | 0.39 |
| 220 | 0.45 | 0.34 |
| 221 | 0.48 | 0.39 |
| 222 | 0.46 | 0.39 |
| 223 | 0.90 | 0.51 |
| 224 | 0.50 | 0.44 |
| 225 | 0.48 | 0.39 |
| 226 | 0.49 | 0.37 |
| 227 | 1.73 | 0.59 |
| 228 | 0.78 | 0.47 |
| 229 | 0.54 | 0.43 |
| 230 | 0.49 | 0.39 |
| 231 | 0.72 | 0.46 |
| 232 | 0.54 | 0.38 |
| 233 | 0.46 | 0.36 |
| 234 | 0.84 | 0.38 |
| 235 | 0.47 | 0.37 |
| 236 | 2.08 | 2.11 |
| 237 | 2.05 | 1.91 |
| 238 | 1.98 | 2.09 |
| 239 | 1.92 | 1.93 |
| 240 | 1.96 | 2.06 |
| 241 | 0.59 | 0.35 |
| 242 | 0.69 | 0.49 |
| 243 | 0.44 | 0.34 |
| 244 | 0.48 | 0.39 |
| 245 | 0.45 | 0.37 |
| 246 | 0.51 | 0.44 |
| 247 | 0.48 | 0.40 |
| 248 | 0.48 | 0.39 |
| 249 | 0.47 | 0.39 |
| 250 | 0.49 | 0.42 |
| 251 | 0.51 | 0.41 |
| 252 | 0.48 | 0.39 |
| 253 | 0.45 | 0.38 |
| 254 | 0.50 | 0.45 |
| 255 | 0.47 | 0.36 |
| 256 | 0.54 | 0.41 |
| 257 | 0.46 | 0.40 |
| 258 | 0.46 | 0.41 |
| 259 | 0.64 | 0.38 |
| 260 | 0.61 | 0.44 |
| 261 | 0.49 | 0.42 |
| 262 | 0.47 | 0.56 |
| 263 | 0.52 | 0.54 |
| 264 | 0.44 | 0.34 |
| 265 | 0.48 | 0.39 |
| 266 | 0.45 | 0.36 |
| 267 | 0.50 | 0.41 |
| 268 | 0.47 | 0.36 |
| 269 | 0.49 | 0.54 |
| 270 | 1.43 | 1.14 |
| 271 | 0.50 | 0.44 |
| 272 | 0.54 | 0.45 |
| 273 | 0.49 | 0.40 |
| 274 | 0.51 | 0.41 |
| 275 | 0.49 | 0.42 |
| 276 | 0.46 | 0.51 |
| 277 | 0.60 | 0.48 |
| 278 | 0.45 | 0.36 |
| 279 | 0.46 | 0.37 |
| 280 | 0.50 | 0.43 |
| 281 | 0.52 | 0.44 |
| 282 | 0.43 | 0.35 |
| 283 | 0.45 | 0.35 |
| 284 | 0.46 | 0.36 |
| 285 | 0.46 | 0.38 |
| 286 | 0.43 | 0.35 |
| 287 | 0.43 | 0.34 |
| 288 | 0.54 | 0.65 |
| 289 | 0.56 | 0.61 |

[0093] As can be seen from the data provided above, IL-10 receptor binding proteins demonstrated significant IL-10 activity in the IL-10 activity assay (Example 4). In particular, IL-10 activity was categorized as low (above unstimulated and A₆₃₀<1), medium (A₆₃₀ 1-1.5) and high (A₆₃₀>1.5) based on absorbance readings. From the above data, 11 IL10R binding proteins demonstrated high activity (SEQ ID Nos: 194, 209, 210, 211, 213, 218, 226, 233, 238, 244 and 250), 4 with medium activity (SEQ ID Nos: 203, 205, 207, and 269) and 8 VHHs with low activity (SEQ ID Nos: 212, 217, 219, 224, 227, 237, 239, and 249). In some embodiments, the present disclosure provides the IL10R binding protein wherein the IL10R binding protein comprises, from amino to carboxy, a first anti-IL10R sdAb joined via a linker to a second anti-IL10R sdAb, according to the following Table 4:

TABLE 4

| first anti-IL10R | second anti-IL10R |
|---|---|
| sdAb SEQ ID | sdAb SEQ ID |
| 48 | 57 |
| 49 | 56 |
| 50 | 55 |
| 52 | 46 |
| 47 | 51 |
| 51 | 47 |
| 46 | 55 |
| 46 | 56 |
| 47 | 56 |
| 46 | 54 |
| 44 | 53 |
| 55 | 44 |
| 46 | 52 |
| 45 | 57 |
| 45 | 55 |
| 47 | 55 |
| 50 | 54 |
| 48 | 55 |
| 46 | 57 |
| 47 | 57 |
| 50 | 56 |
| 49 | 51 |
| 52 | 45 |
| 53 | 44 |
| 54 | 47 |

and wherein the IL10R binding protein further optionally comprises a linker is selected from the group consisting of SEQ ID Nos:1-23.

[0094] IL10R binding proteins described herein are useful in the treatment of neoplastic diseases, such as cancer (e.g., a solid tumor cancer; e.g., non-small-cell lung carcinoma (NSCLC), renal cell carcinoma (RCC), or melanoma) in a subject in need thereof. The IL10R binding protein binds to and activates CD8⁺ T cells, CD4⁺ T cells, macrophages, and/or Treg cells. In some embodiments, the IL10R binding protein described herein can provide a longer therapeutic efficacy (e.g., lower effective dose, reduced toxicity) than a wild-type or pegylated IL10. The IL10R binding protein can trigger different levels of downstream signaling in different cell types. For example, by varying the length of the linker between the anti-IL10Rα V_{H}H antibody and the anti-IL10Rβ V_{H}H antibody in the IL10R binding protein, the IL10R binding protein can cause a higher level of downstream signaling in desired cell types compared to undesired cell types. In some embodiments the IL10R binding protein can be a partial agonist that selectively activate T cells (e.g., CD8⁺ T cells) over macrophages. In some embodiments, activated T cells have an upregulation of IFNgamma. In some embodiments, an IL10R binding protein that is a partial agonist can suppress autoimmune inflammatory diseases such as ulcerative colitis and Crohn's disease. In some embodiments, by varying the linker length, an IL10R binding protein can cause a higher level of downstream signaling in T cells (e.g., CD8⁺ T cells) compared to the level of downstream signaling in macrophages, a cell type that expresses both IL10Rα and IL10Rβ receptors but when activated too potently can cause anemia. When the downstream signaling in macrophages is activated to a high level, these activated macrophages can then eliminate aging red blood cells, causing anemia. An IL10R binding protein can cause a higher level of downstream signaling in T cells (e.g., CD8⁺ T cells) compared to the level of downstream signaling in macrophages, such that anemia is avoided. In other embodiments, different anti-IL10Rα V_{H}H antibodies with different binding affinities and different anti-IL10Rβ V_{H}H antibodies with different binding affinities can be combined to make different IL10R binding proteins. Further, the orientation of the two antibodies in the binding protein can also be changed to make a different binding protein (i.e., anti-IL10Rα V_{H}H antibody-linker-anti-IL10Rβ V_{H}H antibody, or anti-IL10Rβ V_{H}H antibody-linker-anti-IL10Rα V_{H}H antibody). Different IL10R binding proteins can be screened to find the ideal binding protein that causes a higher level of downstream signaling in desired cell types compared to undesired cell types. In some embodiments, the level of downstream signaling in T cells (e.g., CD8⁺ T cells) is at least 1.1, 1.5, 2, 3, 5, or 10 times of the level of downstream signaling in macrophages.

### IFNλ Receptor Binding Proteins

[0095] The interferon (IFN) λ receptor (IFNλR) includes IL10Rβ and IL28 receptor (IL28R) α subunit (IL28Rα). Provided herein is an IFNλR binding protein that specifically binds to IL10Rβ and IL28Rα. In some embodiments, the IFNλR binding protein binds to a mammalian cell expressing both IL10Rβ and IL28Rα. In some embodiments, the IFNλR binding protein can be a bispecific V_{H}H² as described below. In other embodiments, the IFNλR binding protein can include a first domain that is a V_{H}H and a second domain which can be a fragment of IFNλ or, for example, a scFv.

[0096] The IFNλR binding protein can be a bispecific V_{H}H² that has a first V_{H}H binding to IL10Rβ (an anti-IL10Rβ V_{H}H antibody) and a second V_{H}H binding to IL28Rα (an anti-IL28Rα V_{H}H antibody) and causes the dimerization of the two receptor subunits and downstream signaling when bound to a cell expressing IL10Rβ and IL28R, e.g., a macrophage, a T cell (e.g., a CD8⁺ T cell or a CD4⁺ T cell), a Treg cell, a dendritic cell, and/or an epithelial cell.

[0097] A linker can be used to join the anti-IL10Rβ V_{H}H antibody and the anti-IL28Rα V_{H}H antibody. For example, a linker can simply be a covalent bond or a peptide linker. A peptide linker can include between 1 and 50 amino acids (e.g., between 2 and 50, between 5 and 50, between 10 and 50, between 15 and 50, between 20 and 50, between 25 and 50, between 30 and 50, between 35 and 50, between 40 and 50, between 45 and 50, between 2 and 45, between 2 and 40, between 2 and 35, between 2 and 30, between 2 and 25, between 2 and 20, between 2 and 15, between 2 and 10, between 2 and 5 amino acids). A peptide linker joining the anti-IL10Rβ V_{H}H antibody and the anti-IL28Rα V_{H}H antibody can be a flexible glycine-serine linker. A linker can also be a chemical linker, such as a synthetic polymer, e.g., a polyethylene glycol (PEG) polymer.

[0098] The anti-IL10Rβ V_{H}H antibody can have a sequence having at least 90% (e.g., 91%, 92%, 93%, 94%, 95%, 96%, 97%, 98%, 99%, or 100%) sequence identity to the sequence of any one of SEQ ID NOS:51-57.

[0099] The anti-IL10Rβ V_{H}H antibody can have a sequence having at least 90% (e.g., 91%, 92%, 93%, 94%, 95%, 96%, 97%, 98%, 99%, or 100%) sequence identity to the sequence of any one of SEQ ID NOS:99-104.

[0100] The anti-IL28Rα V_{H}H antibody can have a sequence having at least 90% (e.g., 91%, 92%, 93%, 94%, 95%, 96%, 97%, 98%, 99%, or 100%) sequence identity to the sequence of any one of SEQ ID NOS:76-82.

[0101] In some embodiments, the IFNλR binding protein has a reduced Eₘₐₓ compared to the Eₘₐₓ caused by IFNλ. Eₘₐₓ reflects the maximum response level in a cell type that can be obtained by a ligand (e.g., a binding protein described herein or the native cytokine (e.g., IFNλ)). In some embodiments, the IFNλR binding protein described herein has at least 1% (e.g., between 1% and 100%, between 10% and 100%, between 20% and 100%, between 30% and 100%, between 40% and 100%, between 50% and 100%, between 60% and 100%, between 70% and 100%, between 80% and 100%, between 90% and 100%, between 1% and 90%, between 1% and 80%, between 1% and 70%, between 1% and 60%, between 1% and 50%, between 1% and 40%, between 1% and 30%, between 1% and 20%, or between 1% and 10%) of the Eₘₐₓ caused by IFNλ. In other embodiments, the Eₘₐₓ of the IFNλR binding protein described herein is greater (e.g., at least 1%, 5%, 10%, 15%, 20%, 25%, 30%, 35%, 40%, 45%, or 50% greater) than the Eₘₐₓ of the natural ligand, IFNλ. In some embodiments, by varying the linker length of the IFNλR binding protein, the Eₘₐₓ of the IFNλR binding protein can be changed. The IFNλR binding protein can cause Eₘₐₓ in the most desired cell types (e.g., macrophages), and a reduced Eₘₐₓ in other cell types.

[0102] The IFNλR binding proteins of the present disclosure are useful in the treatment of an infectious disease in a subject in need thereof. The IFNλR binding protein binds to and activates macrophages, CD8⁺ T cells, CD4⁺ T cells, Treg cells, dendritic cells, and/or epithelial cells. In particular, the IFNλR binding protein binds to and activates macrophages. Examples of infectious diseases include, but are not limited to, influenza, hepatitis B, hepatitis C, and human immunodeficiency virus (HIV) infection. In some embodiments, the IFNλR binding protein can protect Kuppfer cells in the liver against the effects of an infectious disease. The IFNλR binding protein can trigger different levels of downstream signaling in different cell types. For example, by varying the length of the linker between the anti-IL10Rβ V_{H}H antibody and the anti-IL28Rα V_{H}H antibody in the IFNλR binding protein, the IFNλR binding protein can cause a higher level of downstream signaling in desired cell types (e.g., macrophages) compared to undesired cell types. In some embodiments, by varying the linker length, an IFNλR binding protein results in the modulation of downstream signaling in macrophages compared to the level of downstream signaling in other cell types. In other embodiments, different anti-IL10Rβ V_{H}H antibodies with different binding affinities and different anti-IL28Rα V_{H}H antibodies with different binding affinities can be combined to make different IFNλR binding proteins. Further, the orientation of the two antibodies in the binding protein can also be changed to make a different binding protein (i.e., anti-IL10Rβ V_{H}H antibody-linker-anti-IL28Rα V_{H}H antibody, or anti-IL28Rα V_{H}H antibody-linker-anti-IL10Rβ V_{H}H antibody). Different IFNλR binding proteins can be screened to find the ideal binding protein that causes a higher level of downstream signaling in desired cell types compared to undesired cell types. In some embodiments, the level of downstream signaling in macrophages is at least 1.1, 1.5, 2, 3, 5, or 10 times of the level of downstream signaling in other cell types.

### IL23 Receptor Binding Proteins

[0103] The IL23 receptor (IL23R) includes IL12R β1 subunit (IL12Rβ1) and IL23R subunit. Provided herein is an IL23R binding protein that specifically binds to IL12Rβ1 and IL23R. In some embodiments, the IL23R binding protein binds to a mammalian cell expressing both IL12Rβ1 and IL23R. In some embodiments, the IL23R binding protein can be a bispecific V_{H}H² as described below. In other embodiments, the IL23R binding protein can include a first domain that is a V_{H}H and a second domain which can be a fragment of IL23 or, for example, a scFv.

[0104] The IL23R binding protein can be a bispecific V_{H}H² that has a first V_{H}H binding to IL12Rβ1 (an anti-IL12Rβ1 V_{H}H antibody) and a second V_{H}H binding to IL23R (an anti-IL23R V_{H}H antibody) and causes the dimerization of the two receptor subunits and downstream signaling when bound to a cell expressing IL12Rβ1 and IL23R, e.g., a T cell (e.g., a CD8⁺ T cell or a CD4⁺ T cell), a macrophage, and/or a Treg cell.

[0105] A linker can be used to join the anti-IL12Rβ1 V_{H}H antibody and the anti-IL23R V_{H}H antibody. For example, a linker can simply be a covalent bond or a peptide linker. A peptide linker can include between 1 and 50 amino acids (e.g., between 2 and 50, between 5 and 50, between 10 and 50, between 15 and 50, between 20 and 50, between 25 and 50, between 30 and 50, between 35 and 50, between 40 and 50, between 45 and 50, between 2 and 45, between 2 and 40, between 2 and 35, between 2 and 30, between 2 and 25, between 2 and 20, between 2 and 15, between 2 and 10, between 2 and 5 amino acids). A peptide linker joining the anti-IL12Rβ1 V_{H}H antibody and the anti-IL23R V_{H}H antibody can be a flexible glycine-serine linker. A linker can also be a chemical linker, such as a synthetic polymer, e.g., a polyethylene glycol (PEG) polymer.

[0106] The anti-IL12Rβ1 V_{H}H antibody can have a sequence having at least 90% (e.g., 91%, 92%, 93%, 94%, 95%, 96%, 97%, 98%, 99%, or 100%) sequence identity to the sequence of any one of SEQ ID NOS:105-111.

[0107] The anti-IL23R V_{H}H antibody can have a sequence having at least 90% (e.g., 91%, 92%, 93%, 94%, 95%, 96%, 97%, 98%, 99%, or 100%) sequence identity to the sequence of any one of SEQ ID NOS:64-69.

[0108] The anti-IL23R V_{H}H antibody can have a sequence having at least 90% (e.g., 91%, 92%, 93%, 94%, 95%, 96%, 97%, 98%, 99%, or 100%) sequence identity to the sequence of any one of SEQ ID NOS:118-124.

[0109] In some embodiments, the IL23R binding protein has a reduced Eₘₐₓ compared to the Eₘₐₓ caused by IL23. Eₘₐₓ reflects the maximum response level in a cell type that can be obtained by a ligand (e.g., a binding protein described herein or the native cytokine (e.g., IL23)). In some embodiments, the IL23R binding protein described herein has at least 1% (e.g., between 1% and 100%, between 10% and 100%, between 20% and 100%, between 30% and 100%, between 40% and 100%, between 50% and 100%, between 60% and 100%, between 70% and 100%, between 80% and 100%, between 90% and 100%, between 1% and 90%, between 1% and 80%, between 1% and 70%, between 1% and 60%, between 1% and 50%, between 1% and 40%, between 1% and 30%, between 1% and 20%, or between 1% and 10%) of the Eₘₐₓ caused by IL23. In some embodiments, by varying the linker length of the IL23R binding protein, the Eₘₐₓ of the IL23R binding protein can be changed. The IL23R binding protein can cause Eₘₐₓ in the most desired cell types (e.g., CD8⁺ T cells), and a reduced Eₘₐₓ in other cell types (e.g., marcophages). In some embodiments, the Eₘₐₓ in macrophages caused by an IL23R binding protein described herein is between 1% and 100% (e.g., between 10% and 100%, between 20% and 100%, between 30% and 100%, between 40% and 100%, between 50% and 100%, between 60% and 100%, between 70% and 100%, between 80% and 100%, between 90% and 100%, between 1% and 90%, between 1% and 80%, between 1% and 70%, between 1% and 60%, between 1% and 50%, between 1% and 40%, between 1% and 30%, between 1% and 20%, or between 1% and 10%) of the Eₘₐₓ in T cells (e.g., CD8⁺ T cells) caused by the IL23R binding protein. In other embodiments, the Eₘₐₓ of the IL23R binding protein described herein is greater (e.g., at least 1%, 5%, 10%, 15%, 20%, 25%, 30%, 35%, 40%, 45%, or 50% greater) than the Eₘₐₓ of the natural ligand, IL23.

[0110] An IL23R binding protein described herein are useful in wound healing. Particularly, the IL23R binding protein described herein plays an important role in initiating wound healing, e.g., healing of keratinocyte layer of the skin. The IL23R binding protein binds to and activates CD8⁺ T cells, CD4⁺ T cells, macrophages, and/or Treg cells. The IL23R binding protein can trigger different levels of downstream signaling in different cell types. For example, by varying the length of the linker between the anti-IL12Rβ1 V_{H}H antibody and the anti-IL23R V_{H}H antibody in the IL23R binding protein, the IL23R binding protein can cause a higher level of downstream signaling in desired cell types compared to undesired cell types. In some embodiments the IL23R binding protein can be a partial agonist that selectively activate T cells (e.g., CD8⁺ T cells) over macrophages. In other embodiments, different anti-IL12Rβ1 V_{H}H antibodies with different binding affinities and different anti-IL23R V_{H}H antibodies with different binding affinities can be combined to make different IL23R binding proteins. Further, the orientation of the two antibodies in the binding protein can also be changed to make a different binding protein (i.e., anti-IL12Rβ1 V_{H}H antibody-linker-anti-IL23R V_{H}H antibody, or anti-IL23R V_{H}H antibody-linker-anti-IL12Rβ1 V_{H}H antibody). Different IL23R binding proteins can be screened to find the ideal binding protein that causes a higher level of downstream signaling in desired cell types compared to undesired cell types. In some embodiments, the level of downstream signaling in T cells (e.g., CD8⁺ T cells) is at least 1.1, 1.5, 2, 3, 5, or 10 times of the level of downstream signaling in macrophages.

### IL2 Receptor Binding Proteins

[0111] The IL2 receptor (IL2R) includes CD25 subunit (CD25; also called IL2R α subunit), CD122 subunit (CD122; also called IL2R β subunit), and CD132 subunit (CD132; also called IL2R γ subunit). Provided herein is an IL2R binding protein that specifically binds to CD122 and CD132. In some embodiments, the IL2R binding protein binds to a mammalian cell expressing both CD122 and CD132. In some embodiments, the IL2R binding protein can be a bispecific V_{H}H² as described below. In other embodiments, the IL2R binding protein can include a first domain that is a V_{H}H and a second domain which can be a fragment of IL2 or, for example, a scFv.

[0112] The IL2R binding protein can be a bispecific V_{H}H² that has a first V_{H}H binding to CD122 (an anti-CD122 V_{H}H antibody) and a second V_{H}H binding to CD132 (an anti-CD132 V_{H}H antibody) and causes the dimerization of the two receptor subunits and downstream signaling when bound to a cell expressing CD122 and CD132, e.g., a T cell (e.g., a CD8⁺ T cell or a CD4⁺ T cell), a macrophage, and/or a Treg cell.

[0113] A linker can be used to join the anti-CD122 V_{H}H antibody and the anti-CD132 V_{H}H antibody. For example, a linker can simply be a covalent bond or a peptide linker. A peptide linker can include between 1 and 50 amino acids (e.g., between 2 and 50, between 5 and 50, between 10 and 50, between 15 and 50, between 20 and 50, between 25 and 50, between 30 and 50, between 35 and 50, between 40 and 50, between 45 and 50, between 2 and 45, between 2 and 40, between 2 and 35, between 2 and 30, between 2 and 25, between 2 and 20, between 2 and 15, between 2 and 10, between 2 and 5 amino acids). A peptide linker joining the anti-CD122 V_{H}H antibody and the anti-CD132 V_{H}H antibody can be a flexible glycine-serine linker. A linker can also be a chemical linker, such as a synthetic polymer, e.g., a polyethylene glycol (PEG) polymer.

[0114] The anti-CD122 V_{H}H antibody can have a sequence having at least 90% (e.g., 91%, 92%, 93%, 94%, 95%, 96%, 97%, 98%, 99%, or 100%) sequence identity to the sequence of any one of SEQ ID NOS:30-37.

[0115] The anti-CD122 V_{H}H antibody can have a sequence having at least 90% (e.g., 91%, 92%, 93%, 94%, 95%, 96%, 97%, 98%, 99%, or 100%) sequence identity to the sequence of any one of SEQ ID NOS:90 and 91.

[0116] The anti-CD132 V_{H}H antibody can have a sequence having at least 90% (e.g., 91%, 92%, 93%, 94%, 95%, 96%, 97%, 98%, 99%, or 100%) sequence identity to the sequence of any one of SEQ ID NOS:38-43.

[0117] The anti-CD132 V_{H}H antibody can have a sequence having at least 90% (e.g., 91%, 92%, 93%, 94%, 95%, 96%, 97%, 98%, 99%, or 100%) sequence identity to the sequence of any one of SEQ ID NOS:92-98.

[0118] In some embodiments, the IL2R binding protein has a reduced Eₘₐₓ compared to the Eₘₐₓ caused by IL2. Eₘₐₓ reflects the maximum response level in a cell type that can be obtained by a ligand (e.g., a binding protein described herein or the native cytokine (e.g., IL2)). In some embodiments, the IL2R binding protein described herein has at least 10% (e.g., between 1% and 100%, between 10% and 100%, between 20% and 100%, between 30% and 100%, between 40% and 100%, between 50% and 100%, between 60% and 100%, between 70% and 100%, between 80% and 100%, between 90% and 100%, between 1% and 90%, between 1% and 80%, between 1% and 70%, between 1% and 60%, between 1% and 50%, between 1% and 40%, between 1% and 30%, between 1% and 20%, or between 1% and 10%) of the Eₘₐₓ caused by IL2. In some embodiments, by varying the linker length of the IL2R binding protein, the Eₘₐₓ of the IL2R binding protein can be changed. The IL2R binding protein can cause Eₘₐₓ in the most desired cell types (e.g., CD8⁺ T cells), and a reduced Eₘₐₓ in other cell types (e.g., marcophages). In some embodiments, the Eₘₐₓ in macrophages caused by an IL2R binding protein described herein is between 1% and 100% (e.g., between 10% and 100%, between 20% and 100%, between 30% and 100%, between 40% and 100%, between 50% and 100%, between 60% and 100%, between 70% and 100%, between 80% and 100%, between 90% and 100%, between 1% and 90%, between 1% and 80%, between 1% and 70%, between 1% and 60%, between 1% and 50%, between 1% and 40%, between 1% and 30%, between 1% and 20%, or between 1% and 10%) of the Eₘₐₓ in T cells (e.g., CD8⁺ T cells) caused by the IL2R binding protein. In other embodiments, the Eₘₐₓ of the IL2R binding protein described herein is greater (e.g., at least 1%, 5%, 10%, 15%, 20%, 25%, 30%, 35%, 40%, 45%, or 50% greater) than the Eₘₐₓ of the natural ligand, IL2.

[0119] An IL2R binding protein described herein are useful in the treatment of neoplastic diseases, such as cancer (e.g., a solid tumor cancer; e.g., non-small-cell lung carcinoma (NSCLC), renal cell carcinoma (RCC), melanoma, kidney cancer, or lung cancer) in a subject in need thereof. The IL2R binding protein binds to and activates CD8⁺ T cells, CD4⁺ T cells, macrophages, and/or Treg cells. The IL2R binding protein can trigger different levels of downstream signaling in different cell types. For example, by varying the length of the linker between the anti-CD122 V_{H}H antibody and the anti-CD132 V_{H}H antibody in the IL2R binding protein, the IL2R binding protein can cause a higher level of downstream signaling in desired cell types compared to undesired cell types. In some embodiments, the IL2R binding protein can be a partial agonist that selectively activate T cells (e.g., CD8⁺ T cells) over macrophages. In some embodiments, an IL2R binding protein that is a partial agonist can suppress autoimmune inflammatory diseases such as lupus, type-2 diabetes, ulcerative colitis, and Crohn's disease. In some embodiments, by varying the linker length, an IL2R binding protein can cause a higher level of downstream signaling in T cells (e.g., CD8⁺ T cells) compared to the level of downstream signaling in other cell types. In other embodiments, different anti-CD122 V_{H}H antibodies with different binding affinities and different anti-CD132 V_{H}H antibodies with different binding affinities can be combined to make different IL2R binding proteins. Further, the orientation of the two antibodies in the binding protein can also be changed to make a different binding protein (i.e., anti-CD122 V_{H}H antibody-linker-anti-CD132 V_{H}H antibody, or anti-CD132 V_{H}H antibody-linker-anti-CD122 V_{H}H antibody). Different IL2R binding proteins can be screened to find the ideal binding protein that causes a higher level of downstream signaling in desired cell types compared to undesired cell types. In some embodiments, the level of downstream signaling in T cells (e.g., CD8⁺ T cells) is at least 1.1, 1.5, 2, 3, 5, or 10 times of the level of downstream signaling in other cell types.

### IL22 Receptor Binding Proteins

[0120] The IL22 receptor (IL22R) includes IL22R1 subunit (IL22R1) and IL10Rβ subunit (IL10Rβ). While IL10Rβ is expressed on a wide range of cells and especially immune cells including monocytes, T cells, B cells and NK cells, in contrast, the expression of the IL22R1 subunit of the IL22 receptor complex is primarily observed in non-immune tissues including the skin, small intestine, liver, colon, lung, kidney, and pancreas, see, e.g., Wolk, et al. (2004) Immunity 21(2):241-254. Provided herein is an IL22R binding protein that specifically binds to IL22R1 and IL10Rβ. In some embodiments, the IL22R binding protein binds to a mammalian cell expressing both IL22R1 and IL10Rβ. In some embodiments, the IL22R binding protein can be a bispecific V_{H}H² as described below. In other embodiments, the IL22R binding protein can include a first domain that is a V_{H}H and a second domain which can be a fragment of IL22 or, for example, a scFv.

[0121] The IL22R binding protein can be a bispecific V_{H}H² that has a first V_{H}H binding to IL22R1 (an anti-IL22R1 V_{H}H antibody) and a second V_{H}H binding to IL10Rβ (an anti-IL10Rβ V_{H}H antibody) and causes the dimerization of the two receptor subunits and downstream signaling when bound to a cell expressing IL22R1 and IL10Rβ, e.g., an epithelial cell. IL22R is expressed on tissue cells, and it is absent on immune cells. IL22R1 is almost exclusively expressed on cells of non-hematopoietic origin such as epithelial, renal tubular, and pancreatic ductal cells.

[0122] A linker can be used to join the anti-IL22R1 V_{H}H antibody and the anti-IL10Rβ V_{H}H antibody. For example, a linker can simply be a covalent bond or a peptide linker. A peptide linker can include between 1 and 50 amino acids (e.g., between 2 and 50, between 5 and 50, between 10 and 50, between 15 and 50, between 20 and 50, between 25 and 50, between 30 and 50, between 35 and 50, between 40 and 50, between 45 and 50, between 2 and 45, between 2 and 40, between 2 and 35, between 2 and 30, between 2 and 25, between 2 and 20, between 2 and 15, between 2 and 10, between 2 and 5 amino acids). A peptide linker joining the anti-IL22R1 V_{H}H antibody and the anti-IL10Rβ V_{H}H antibody can be a flexible glycine-serine linker. A linker can also be a chemical linker, such as a synthetic polymer, e.g., a polyethylene glycol (PEG) polymer.

[0123] The anti-IL10Rβ V_{H}H antibody can have a sequence having at least 90% (e.g., 91%, 92%, 93%, 94%, 95%, 96%, 97%, 98%, 99%, or 100%) sequence identity to the sequence of any one of SEQ ID NOS:51-57.

[0124] The anti-IL10Rβ V_{H}H antibody can have a sequence having at least 90% (e.g., 91%, 92%, 93%, 94%, 95%, 96%, 97%, 98%, 99%, or 100%) sequence identity to the sequence of any one of SEQ ID NOS:99-104.

[0125] In some embodiments, the IL22R binding protein has a reduced Eₘₐₓ compared to the Eₘₐₓ caused by IL22. Eₘₐₓ reflects the maximum response level in a cell type that can be obtained by a ligand (e.g., a binding protein described herein or the native cytokine (e.g., IL22)). In some embodiments, the IL22R binding protein described herein has at least 1% (e.g., between 1% and 100%, between 10% and 100%, between 20% and 100%, between 30% and 100%, between 40% and 100%, between 50% and 100%, between 60% and 100%, between 70% and 100%, between 80% and 100%, between 90% and 100%, between 1% and 90%, between 1% and 80%, between 1% and 70%, between 1% and 60%, between 1% and 50%, between 1% and 40%, between 1% and 30%, between 1% and 20%, or between 1% and 10%) of the Eₘₐₓ caused by IL22. In some embodiments, by varying the linker length of the IL22R binding protein, the Eₘₐₓ of the IL22R binding protein can be changed.

[0126] The IL22R binding protein can cause Eₘₐₓ in the most desired cell types (e.g., epithelial cells, IL22R1 expressing tumor cells, and a reduced Eₘₐₓ in other cell types). In some embodiments, the Eₘₐₓ in macrophages caused by an IL22R binding protein described herein is between 1% and 100% (e.g., between 10% and 100%, between 20% and 100%, between 30% and 100%, between 40% and 100%, between 50% and 100%, between 60% and 100%, between 70% and 100%, between 80% and 100%, between 90% and 100%, between 1% and 90%, between 1% and 80%, between 1% and 70%, between 1% and 60%, between 1% and 50%, between 1% and 40%, between 1% and 30%, between 1% and 20%, or between 1% and 10%) of the Eₘₐₓ in epithelialis cells caused by the IL22R binding protein. In other embodiments, the Eₘₐₓ of the IL22R binding protein described herein is greater (e.g., at least 1%, 5%, 10%, 15%, 20%, 25%, 30%, 35%, 40%, 45%, or 50% greater) than the Eₘₐₓ of the natural ligand, IL22.

[0127] The biological activity of IL22 is modulated by a specific endogenous antagonist, IL22 binding protein (IL22BP) which is regarded as a soluble, neutralizing decoy receptor for IL22. As wild-type IL22 possesses a higher affinity with respect to IL22BP as compared with the IL22 receptor complex, IL22BP is supposed to control IL22 biological activity in vivo. In one embodiment, the IL22R binding proteins of the present disclosure may provide preferential binding to the IL22 receptor complex versus the IL22BP avoiding the endogenous antagonism and modulation of IL22 activity derived from the presence of the endogenous IL22BP. In some embodiments, an IL22R binding protein described herein exhibits between 1% and 100% (e.g., between 10% and 100%, between 20% and 100%, between 30% and 100%, between 40% and 100%, between 50% and 100%, between 60% and 100%, between 70% and 100%, between 80% and 100%, between 90% and 100%, between 1% and 90%, between 1% and 80%, between 1% and 70%, between 1% and 60%, between 1% and 50%, between 1% and 40%, between 1% and 30%, between 1% and 20%, or between 1% and 10%) of the affinity of the natural ligand, IL22, for the IL22BP.

[0128] An IL22R binding protein described herein are useful in the treatment of neoplastic diseases, such as cancer (e.g., a solid tumor cancer; e.g., non-small-cell lung carcinoma (NSCLC), renal cell carcinoma (RCC), melanoma, kidney cancer, or lung cancer) in a subject in need thereof. The IL22R binding protein binds to and activates epithelial cells. The IL22R binding protein can trigger different levels of downstream signaling in the target cell. For example, by varying the length of the linker between the anti-IL22R1 V_{H}H antibody and the anti-IL10Rβ V_{H}H antibody in the IL22R binding protein, the IL22R binding protein can cause a differing (e.g., higher or lower) level of downstream signaling in desired cell types compared to undesired cell types. In some embodiments, the IL22R binding protein can be a partial agonist that selectively activate epithelial cells. In some embodiments, an IL22R binding protein that is a partial agonist is useful in the treatment or prevention of diseases such as psoriasis, graft-versus-host disease, inflammatory diseases of the lung and airway such as lung fibrosis, ventilator induced lung injury, neoplastic disease (e.g., IL22R1-expressing tumors), liver fibrosis, diseases associated with liver injury such as alcohol toxicity (acute or chronic) steatosis, and pancreatitis, lupus, type-2 diabetes, ulcerative colitis, and Crohn's disease. In some embodiments, by varying the linker length, an IL22R binding protein can cause a higher level of downstream signaling in epithelial cells compared to the level of downstream signaling in other cell types. In other embodiments, different anti-IL22R1 V_{H}H antibodies with different binding affinities and different anti-IL10Rβ V_{H}H antibodies with different binding affinities can be combined to make different IL22R binding proteins. Further, the orientation of the two antibodies in the binding protein can also be changed to make a different binding protein (i.e., anti-IL22R1 V_{H}H antibody-linker-anti-IL10Rβ V_{H}H antibody, or anti-IL10Rβ V_{H}H antibody-linker-anti-IL22R1 V_{H}H antibody). Different IL22R binding proteins can be screened to find the ideal binding protein that causes a higher level of downstream signaling in desired cell types compared to undesired cell types. In some embodiments, the level of downstream signaling in the target cell is at least 1.1, 1.5, 2, 3, 5, or 10 times of the level of downstream signaling in other cell types or cells derived from different tissues.

[0129] Receptor Binding Proteins that Bind to Non-Natural Receptor Pairs

Receptor Binding Proteins that Bind IL10Rα and IL2Rγ

[0130] Provided herein is a binding protein that specifically binds to IL10Rα and IL2Rγ. In some embodiments, the binding protein binds to a mammalian cell expressing both IL10Rα and IL2Rγ. In some embodiments, the binding protein is a bispecific V_{H}H² that has a first V_{H}H that specifically binds to the extracellular domain of IL10Rα (an anti-IL10Rα V_{H}H antibody) and a second V_{H}H that specifically binds to the extracellular domain of IL2Rγ (an anti-IL2Rγ V_{H}H antibody) and causes the dimerization of the two receptor subunits and downstream signaling when bound to a cell expressing IL10Rα and IL2Rγ, e.g., a T cell (e.g., a CD8⁺ T cell and/or a CD4⁺ T cell). In some embodiments, a binding protein that specifically binds to IL10Rα and IL2Rγ can be a bispecific V_{H}H² as described below. In other embodiments, the binding protein can include a first domain that is a V_{H}H and a second domain which can be a fragment of IL10Rα or IL2Rγ or, for example, a scFv.

[0131] A linker can be used to join the anti-IL10Rα V_{H}H antibody and the anti-IL2Rγ V_{H}H antibody. For example, a linker can simply be a covalent bond or a peptide linker. A peptide linker can include between 1 and 50 amino acids (e.g., between 2 and 50, between 5 and 50, between 10 and 50, between 15 and 50, between 20 and 50, between 25 and 50, between 30 and 50, between 35 and 50, between 40 and 50, between 45 and 50, between 2 and 45, between 2 and 40, between 2 and 35, between 2 and 30, between 2 and 25, between 2 and 20, between 2 and 15, between 2 and 10, between 2 and 5 amino acids). A peptide linker joining the anti-IL10Rα V_{H}H antibody and the anti-IL2Rγ V_{H}H antibody can be a flexible glycine-serine linker. A linker can also be a chemical linker, such as a synthetic polymer, e.g., a polyethylene glycol (PEG) polymer.

[0132] The anti-IL10Rα V_{H}H antibody can have a sequence having at least 90% (e.g., 91%, 92%, 93%, 94%, 95%, 96%, 97%, 98%, 99%, or 100%) sequence identity to the sequence of any one of SEQ ID NOS:44-50.

[0133] The anti-IL2Rγ V_{H}H antibody can have a sequence having at least 90% (e.g., 91%, 92%, 93%, 94%, 95%, 96%, 97%, 98%, 99%, or 100%) sequence identity to the sequence of any one of SEQ ID NOS:38-43.

[0134] The anti-IL2Rγ V_{H}H antibody can have a sequence having at least 90% (e.g., 91%, 92%, 93%, 94%, 95%, 96%, 97%, 98%, 99%, or 100%) sequence identity to the sequence of any one of SEQ ID NOS:92-98.

[0135] In some embodiments, the binding protein that specifically binds to IL10Rα and IL2Rγ has a reduced Eₘₐₓ compared to the Eₘₐₓ of IL10. Eₘₐₓ reflects the maximum response level in a cell type that can be obtained by a ligand (e.g., a binding protein described herein or the native cytokine (e.g., IL10)). In some embodiments, the binding protein that specifically binds to IL10Rα and IL2Rγ described herein has at least 1% (e.g., between 1% and 100%, between 10% and 100%, between 20% and 100%, between 30% and 100%, between 40% and 100%, between 50% and 100%, between 60% and 100%, between 70% and 100%, between 80% and 100%, between 90% and 100%, between 10% and 90%, between 10% and 80%, between 1% and 70%, between 1% and 60%, between 1% and 50%, between 1% and 40%, between 1% and 30%, between 1% and 20%, or between 1% and 10%) of the Eₘₐₓ caused by IL10. In some embodiments, by varying the linker length of the binding protein that specifically binds to IL10Rα and IL2Rγ, the Eₘₐₓ of the binding protein can be changed. The binding protein can cause Eₘₐₓ in the most desired cell types CD8⁺ T cells. In some embodiments, the Eₘₐₓ in CD8⁺ T cells caused by a binding protein that specifically binds to IL10Rα and IL2Rγ is between 10% and 100% (e.g., between 10% and 100%, between 20% and 100%, between 30% and 100%, between 40% and 100%, between 50% and 100%, between 60% and 100%, between 70% and 100%, between 80% and 100%, between 90% and 100%, between 1% and 90%, between 1% and 80%, between 1% and 70%, between 1% and 60%, between 1% and 50%, between 1% and 40%, between 1% and 30%, between 1% and 20%, or between 1% and 10%) of the Eₘₐₓ in other T cells caused by the binding protein. In other embodiments, the Eₘₐₓ of the binding protein that specifically binds to IL10Rα and IL2Rγ is greater (e.g., at least 1%, 5%, 10%, 15%, 20%, 25%, 30%, 35%, 40%, 45%, or 50% greater) than the Eₘₐₓ of the natural ligand.

[0136] A binding protein that binds to IL10Rα and IL2Rγ as described herein is useful in the treatment of disease in a subject in need thereof including but not limited to the treatment of neoplastic diseases, such as cancer (e.g., a solid tumor cancer; e.g., non-small-cell lung carcinoma (NSCLC), renal cell carcinoma (RCC), or melanoma). The binding protein binds to and activates CD8⁺ T cells and/or CD4⁺ T cells. In certain embodiments, the method does not cause anemia. It is known that IL10 has activities on macrophages and T cells. In some embodiments, the method provided herein uses a binding protein of the present disclosure that binds to IL10Rα and IL2Rγ resulting in the selective activation of T cells relative to activation of macrophages. The selective activation of T cells relative to macrophages is beneficial because IL10-activated macrophages can phagocytose aging red blood cells, which manifests itself as anemia in a patient receiving IL10. Binding proteins as described herein that provide for the selective substantial activation of T cells while providing a minimal activation of macrophages result in a molecule that produces lower side effects, such as anemia, relative to the native IL10 ligand. Other problems and toxicities related to IL10 activation are described in, e.g., Fioranelli and Grazia, J Integr Cardiol 1(1):2-6, 2014. Such problems can be avoided by using a binding protein of the present disclosure that specifically binds to IL10Rα and IL2Rγ.

[0137] In some embodiments, the binding protein that binds to IL10Rα and IL2Rγ can trigger different levels of downstream signaling in different cell types. For example, by varying the length of the linker between the anti-IL10Rα V_{H}H antibody and the anti-IL2Rγ V_{H}H antibody in the binding protein, the downstream signaling of the binding protein is modulated in CD8⁺ T cells compared to other T cells. In other embodiments, different anti-IL10Rα V_{H}H antibodies with different binding affinities and different anti-IL2Rγ V_{H}H antibodies with different binding affinities can be combined to make different binding proteins. Further, the orientation of the two antibodies in the binding protein can also be changed to make a different binding protein (i.e., anti-IL10Rα V_{H}H antibody-linker-anti-IL2Rγ V_{H}H antibody, or anti-IL2Rγ V_{H}H antibody-linker-anti-IL10Rα V_{H}H antibody). Different binding proteins can be screened to find the ideal binding protein that causes a higher level of downstream signaling in desired cell types compared to undesired cell types. In some embodiments, the level of downstream signaling in CD8⁺ T cells is at least 1.1, 1.5, 2, 3, 5, or 10 times of the level of downstream signaling in other T cells.

Receptor Binding Proteins that Bind IFNγR1 or IL28Rα and Myeloid Cells and/or T Cells

[0138] Provided herein is also a binding protein that specifically binds to a first receptor and a second receptor, in which the first receptor is interferon γ receptor 1 (IFNγR1) or IL28Rα and the second receptor is preferentially expressed on myeloid cells and/or T cells. In some embodiments, the binding protein binds to a mammalian cell expressing both the first receptor and the second receptor. For example, a binding protein can selectively trigger downstream signaling in T cells if the binding protein binds to IFNγR1 as the first receptor and IL2Rγ as the second receptor expressed on T cells. In some embodiments, the binding protein can be a bispecific V_{H}H² as described below. In other embodiments, the binding protein can include a first domain that is a V_{H}H and a second domain which can be a fragment of IFNγR1 or IL28Rα or, for example, a scFv.

[0139] In one embodiment, the binding protein is a bispecific V_{H}H² having a first V_{H}H binding that specifically binds to the first receptor (e.g., an anti-IFNγR1 V_{H}H antibody or an anti-IL28Rα V_{H}H antibody) and a second V_{H}H that specifically binds to the second receptor and causes the dimerization of the two receptors and downstream signaling when bound to a cell expressing IFNγR1 or IL28Rα and a cell expressing the second receptor, e.g., a myeloid cell and/or T cell.

[0140] A linker can be used to join the two V_{H}Hs. For example, a linker can simply be a covalent bond or a peptide linker. A peptide linker can include between 1 and 50 amino acids (e.g., between 2 and 50, between 5 and 50, between 10 and 50, between 15 and 50, between 20 and 50, between 25 and 50, between 30 and 50, between 35 and 50, between 40 and 50, between 45 and 50, between 2 and 45, between 2 and 40, between 2 and 35, between 2 and 30, between 2 and 25, between 2 and 20, between 2 and 15, between 2 and 10, between 2 and 5 amino acids). A peptide linker joining the two V_{H}Hs can be a flexible glycine-serine linker. A linker can also be a chemical linker, such as a synthetic polymer, e.g., a polyethylene glycol (PEG) polymer.

[0141] The anti-IL28Rα V_{H}H antibody can have a sequence having at least 90% (e.g., 91%, 92%, 93%, 94%, 95%, 96%, 97%, 98%, 99%, or 100%) sequence identity to the sequence of any one of SEQ ID NOS:76-82.

[0142] In certain embodiments of the binding protein described herein, the binding protein binds to the first receptor IFNγR1 and the second receptor IL2Rγ. In particular embodiments, the binding protein can activate T cells and avoid activating macrophages. In other embodiments, different antibodies with different binding affinities to the first receptor and different antibodies with different binding affinities to the second receptor can be combined to make different binding proteins. Further, the orientation of the two antibodies in the binding protein can also be changed to make a different binding protein (i.e., V_{H}H antibody to the first receptor-linker-V_{H}H antibody to the second receptor, or V_{H}H antibody to the second receptor-linker-V_{H}H antibody to the first receptor). Different binding proteins can be screened to find the ideal binding protein that causes a higher level of downstream signaling in desired cell types compared to undesired cell types. In some embodiments, the level of downstream signaling in T cells is at least 1.1, 1.5, 2, 3, 5, or 10 times of the level of downstream signaling in macrophages.

[0143] In certain embodiments of the binding protein described herein, the binding protein binds to the first receptor IL28Rα and the second receptor IL2Rγ.

[0144] The binding protein described herein are useful in the treatment of neoplastic diseases, such as cancer (e.g., a solid tumor cancer; e.g., non-small-cell lung carcinoma (NSCLC), renal cell carcinoma (RCC), or melanoma) in a subject in need thereof. In some embodiments, the binding protein binds to and activates myeloid cells and/or T cells. In particular embodiments, the binding protein binds to and activates macrophages. In particular embodiments, the binding protein binds to and activates CD8⁺ T cells and/or CD4⁺ T cells.

### IV. Single-Domain Antibody and V_{H}H

[0145] A single-domain antibody (sdAb) is an antibody containing a single monomeric variable antibody domain. Like a full-length antibody, it is able to bind selectively to a specific antigen. The complementary determining regions (CDRs) of sdAbs are within a single-domain polypeptide. Single-domain antibodies can be engineered from heavy-chain antibodies found in camelids, which are referred to as V_{H}Hs. Cartilaginous fishes also have heavy-chain antibodies (IgNAR, “immunoglobulin new antigen receptor”), from which single-domain antibodies referred to as V_{NARS} can be obtained. The dimeric variable domains from common immunoglobulin G (IgG) from humans or mice can also be split into monomers to make sdAbs. Although most research into sdAbs is currently based on heavy chain variable domains, sdAbs derived from light chains have also been shown to bind specifically to target, see, e.g., Moller et al., J Biol Chem. 285(49):38348-38361, 2010. In some embodiments, a sdAb is composed of a single monomeric light chain variable antibody domain.

[0146] A sdAb can be a heavy chain antibody (V_{H}H). A V_{H}H is a type of sdAb that has a single monomeric heavy chain variable antibody domain. Similar to a traditional antibody, a V_{H}H is able to bind selectively to a specific antigen. A binding protein described herein can include two V_{H}Hs (e.g., V_{H}H²) joined together by a linker (e.g., a peptide linker). The binding protein can be a bispecific V_{H}H² that includes a first V_{H}H binding to a first receptor or domain or subunit thereof and a second V_{H}H binding to a second receptor or domain or subunit thereof, in which the two V_{H}Hs are joined by a linker.

[0147] An exemplary V_{H}H has a molecular weight of approximately 12-15 kDa which is much smaller than traditional mammalian antibodies (150-160 kDa) composed of two heavy chains and two light chains. V_{H}Hs can be found in or produced from Camelidae mammals (e.g., camels, llamas, dromedary, alpaca, and guanaco) which are naturally devoid of light chains. Descriptions of sdAbs and V_{H}HS can be found in, e.g., De Greve et al., Curr Opin Biotechnol. 61:96-101, 2019; Ciccarese, et al., Front Genet. 10:997, 2019; Chanier and Chames, Antibodies (Basel) 8(1), 2019; and De Vlieger et al., Antibodies (Basel) 8(1), 2018.

[0148] To prepare a binding protein that is a bispecific V_{H}H², in some embodiments, the two V_{H}Hs can be synthesized separately, then joined together by a linker. Alternatively, the bispecific V_{H}H² can be synthesized as a fusion protein. V_{H}Hs having different binding activities and receptor targets can be paired to make a bispecific V_{H}H². The binding proteins can be screened for signal transduction on cells carrying one or both relevant receptors.

### V. Linkers

[0149] As previously described, the binding domains of the binding proteins of the present disclosure may be joined contiguously (e.g., the C-terminal amino acid of the first V_{H}H in the binding protein to the N-terminal amino acid of the second V_{H}H in the binding protein) or the binding domains of the binding protein may optionally be joined via a linker. A linker is a linkage between two elements, e.g., protein domains. In a bispecific V_{H}H² binding protein described herein, a linker is a linkage between the two V_{H}Hs in the binding protein. A linker can be a covalent bond or a peptide linker. In some embodiments, the two V_{H}Hs in a binding protein are joined directly (i.e., via a covalent bond). The length of the linker between two V_{H}Hs in a binding protein can be used to modulate the proximity of the two V_{H}Hs of the binding protein. By varying the length of the linker, the overall size and length of the binding protein can be tailored to bind to specific cell receptors or domains or subunits thereof. For example, if the binding protein is designed to bind to two receptors or domains or subunits thereof that are located close to each other on the same cell, then a short linker can be used. In another example, if the binding protein is designed to bind to two receptors or domains or subunits there of that are located on two different cells, then a long linker can be used.

[0150] In some embodiments, the linker is a peptide linker. A peptide linker can include between 1 and 50 amino acids (e.g., between 2 and 50, between 5 and 50, between 10 and 50, between 15 and 50, between 20 and 50, between 25 and 50, between 30 and 50, between 35 and 50, between 40 and 50, between 45 and 50, between 2 and 45, between 2 and 40, between 2 and 35, between 2 and 30, between 2 and 25, between 2 and 20, between 2 and 15, between 2 and 10, between 2 and 5 amino acids). A linker can also be a chemical linker, such as a synthetic polymer, e.g., a polyethylene glycol (PEG) polymer.

[0151] In some embodiments, a linker joins the C-terminus of the first V_{H}H in the binding protein to the N-terminus of the second V_{H}H in the binding protein. In other embodiments, a linker joins the C-terminus of the second V_{H}H in the binding protein to the N-terminus of the first V_{H}H in the binding protein.

[0152] Suitable peptide linkers are known in the art, and include, for example, peptide linkers containing flexible amino acid residues such as glycine and serine. In certain embodiments, a peptide linker can contain motifs, e.g., multiple or repeating motifs, of GS, GGS, GGGGS (SEQ ID NO: 1), GGGGGS (SEQ ID NO:2), GGSG (SEQ ID NO:3), or SGGG (SEQ ID NO:4). In certain embodiments, a peptide linker can contain 2 to 12 amino acids including motifs of GS, e.g., GS, GSGS (SEQ ID NO:5), GSGSGS (SEQ ID NO:6), GSGSGSGS (SEQ ID NO:191), GSGSGSGSGS (SEQ ID NO:7), or GSGSGSGSGSGS (SEQ ID NO:8). In certain other embodiments, a peptide linker can contain 3 to 12 amino acids including motifs of GGS, e.g., GGS, GGSGGS (SEQ ID NO:9), GGSGGSGGS (SEQ ID NO:10), and GGSGGSGGSGGS (SEQ ID NO:11). In yet other embodiments, a peptide linker can contain 4 to 20 amino acids including motifs of GGSG (SEQ ID NO:3), e.g., GGSGGGSG (SEQ ID NO:12), GGSGGGSGGGSG (SEQ ID NO:13), GGSGGGSGGGSGGGSG (SEQ ID NO:14), or GGSGGGSGGGSGGGSGGGSG (SEQ ID NO: 15). In other embodiments, a peptide linker can contain motifs of GGGGS (SEQ ID NO: 1), e.g., GGGGSGGGGS (SEQ ID NO:16) or GGGGSGGGGSGGGGS (SEQ ID NO:17).

### VI. Modifications to Extend Duration of Action In Vivo

[0153] The binding proteins described herein can be modified to provide for an extended lifetime in vivo and/or extended duration of action in a subject. In some embodiments, the binding protein can be conjugated to carrier molecules to provide desired pharmacological properties such as an extended half-life. In some embodiments, the binding protein can be covalently linked to the Fc domain of IgG, albumin, or other molecules to extend its half-life, e.g., by pegylation, glycosylation, and the like as known in the art.

[0154] In some embodiments, the binding protein is conjugated to a functional domain of an Fc-fusion chimeric polypeptide molecule. Fc fusion conjugates have been shown to increase the systemic half-life of biopharmaceuticals, and thus the biopharmaceutical product can require less frequent administration. Fc binds to the neonatal Fc receptor (FcRn) in endothelial cells that line the blood vessels, and, upon binding, the Fc fusion molecule is protected from degradation and re-released into the circulation, keeping the molecule in circulation longer. This Fc binding is believed to be the mechanism by which endogenous IgG retains its long plasma half-life. More recent Fc-fusion technology links a single copy of a biopharmaceutical to the Fc region of an antibody to optimize the pharmacokinetic and pharmacodynamic properties of the biopharmaceutical as compared to traditional Fc-fusion conjugates. The “Fc region” useful in the preparation of Fc fusions can be a naturally occurring or synthetic polypeptide that is homologous to an IgG C-terminal domain produced by digestion of IgG with papain. IgG Fc has a molecular weight of approximately 50 kDa. The binding protein described herein can be conjugated to the entire Fc region, or a smaller portion that retains the ability to extend the circulating half-life of a chimeric polypeptide of which it is a part. In addition, full-length or fragmented Fc regions can be variants of the wild-type molecule. In a typical presentation, each monomer of the dimeric Fc can carry a heterologous polypeptide, the heterologous polypeptides being the same or different.

[0155] In some embodiments, when the binding protein described herein is to be administered in the format of an Fc fusion, particularly in those situations when the polypeptide chains conjugated to each subunit of the Fc dimer are different, the Fc fusion may be engineered to possess a “knob-into-hole modification.” The knob-into-hole modification is more fully described in Ridgway, et al. (1996) Protein Engineering 9(7):617-621 and U.S. Pat. No. 5,731,168, issued Mar. 24, 1998. The knob-into-hole modification refers to a modification at the interface between two immunoglobulin heavy chains in the CH3 domain, wherein: i) in a CH3 domain of a first heavy chain, an amino acid residue is replaced with an amino acid residue having a larger side chain (e.g., tyrosine or tryptophan) creating a projection from the surface (“knob”), and ii) in the CH3 domain of a second heavy chain, an amino acid residue is replaced with an amino acid residue having a smaller side chain (e.g., alanine or threonine), thereby generating a cavity (“hole”) at interface in the second CH3 domain within which the protruding side chain of the first CH3 domain (“knob”) is received by the cavity in the second CH3 domain. In one embodiment, the “knob-into-hole modification” comprises the amino acid substitution T366W and optionally the amino acid substitution S354C in one of the antibody heavy chains, and the amino acid substitutions T366S, L368A, Y407V and optionally Y349C in the other one of the antibody heavy chains. Furthermore, the Fc domains may be modified by the introduction of cysteine residues at positions 5354 and Y349 which results in a stabilizing disulfide bridge between the two antibody heavy chains in the Fc region (Carter, et al. (2001) Immunol Methods 248, 7-15). The knob-into-hole format is used to facilitate the expression of a first polypeptide on a first Fc monomer with a “knob” modification and a second polypeptide on the second Fc monomer possessing a “hole” modification to facilitate the expression of heterodimeric polypeptide conjugates.

[0156] In some embodiments, the binding protein can be conjugated to one or more water-soluble polymers. Examples of water soluble polymers useful in the practice of the present disclosure include polyethylene glycol (PEG), poly-propylene glycol (PPG), polysaccharides (polyvinylpyrrolidone, copolymers of ethylene glycol and propylene glycol, poly(oxyethylated polyol), polyolefinic alcohol), polysaccharides), poly-alpha-hydroxy acid), polyvinyl alcohol (PVA), polyphosphazene, polyoxazolines (POZ), poly(N-acryloylmorpholine), or a combination thereof.

[0157] In some embodiments, binding protein can be conjugated to one or more polyethylene glycol molecules or “PEGylated.” Although the method or site of PEG attachment to the binding protein may vary, in certain embodiments the PEGylation does not alter, or only minimally alters, the activity of the binding protein.

[0158] In some embodiments, selective PEGylation of the binding protein, for example, by the incorporation of non-natural amino acids having side chains to facilitate selective PEG conjugation, may be employed. Specific PEGylation sites can be chosen such that PEGylation of the binding protein does not affect its binding to the target receptors.

[0159] In certain embodiments, the increase in half-life is greater than any decrease in biological activity. PEGs suitable for conjugation to a polypeptide sequence are generally soluble in water at room temperature, and have the general formula R(O—CH₂—CH₂)ₙO—R, where R is hydrogen or a protective group such as an alkyl or an alkanol group, and where n is an integer from 1 to 1000. When R is a protective group, it generally has from 1 to 8 carbons. The PEG conjugated to the polypeptide sequence can be linear or branched. Branched PEG derivatives, “star-PEGs” and multi-armed PEGs are contemplated by the present disclosure.

[0160] A molecular weight of the PEG used in the present disclosure is not restricted to any particular range. The PEG component of the binding protein can have a molecular mass greater than about 5 kDa, greater than about 10 kDa, greater than about 15 kDa, greater than about 20 kDa, greater than about 30 kDa, greater than about 40 kDa, or greater than about 50 kDa. In some embodiments, the molecular mass is from about 5 kDa to about 10 kDa, from about 5 kDa to about 15 kDa, from about 5 kDa to about 20 kDa, from about 10 kDa to about 15 kDa, from about 10 kDa to about 20 kDa, from about 10 kDa to about 25 kDa, or from about 10 kDa to about 30 kDa. Linear or branched PEG molecules having molecular weights from about 2,000 to about 80,000 daltons, alternatively about 2,000 to about 70,000 daltons, alternatively about 5,000 to about 50,000 daltons, alternatively about 10,000 to about 50,000 daltons, alternatively about 20,000 to about 50,000 daltons, alternatively about 30,000 to about 50,000 daltons, alternatively about 20,000 to about 40,000 daltons, or alternatively about 30,000 to about 40,000 daltons. In one embodiment of the disclosure, the PEG is a 40 kD branched PEG comprising two 20 kD arms.

[0161] The present disclosure also contemplates compositions of conjugates wherein the PEGs have different n values, and thus the various different PEGs are present in specific ratios. For example, some compositions comprise a mixture of conjugates where n=1, 2, 3 and 4. In some compositions, the percentage of conjugates where n=1 is 18-25%, the percentage of conjugates where n=2 is 50-66%, the percentage of conjugates where n=3 is 12-16%, and the percentage of conjugates where n=4 is up to 5%. Such compositions can be produced by reaction conditions and purification methods known in the art. Chromatography may be used to resolve conjugate fractions, and a fraction is then identified which contains the conjugate having, for example, the desired number of PEGs attached, purified free from unmodified protein sequences and from conjugates having other numbers of PEGs attached.

[0162] PEGs suitable for conjugation to a polypeptide sequence are generally soluble in water at room temperature, and have the general formula R(O—CH₂—CH₂)ₙO—R, where R is hydrogen or a protective group such as an alkyl or an alkanol group, and where n is an integer from 1 to 1000. When R is a protective group, it generally has from 1 to 8 carbons.

[0163] Two widely used first generation activated monomethoxy PEGs (mPEGs) are succinimdyl carbonate PEG (SC-PEG; see, e.g., Zalipsky, et al. (1992) Biotehnol. Appl. Biochem 15:100-114) and benzotriazole carbonate PEG (BTC-PEG; see, e.g., Dolence, et al. U.S. Pat. No. 5,650,234), which react preferentially with lysine residues to form a carbamate linkage but are also known to react with histidine and tyrosine residues. Use of a PEG-aldehyde linker targets a single site on the N-terminus of a polypeptide through reductive amination.

[0164] Pegylation most frequently occurs at the α-amino group at the N-terminus of the polypeptide, the epsilon amino group on the side chain of lysine residues, and the imidazole group on the side chain of histidine residues. Since most recombinant polypeptides possess a single alpha and a number of epsilon amino and imidazole groups, numerous positional isomers can be generated depending on the linker chemistry. General PEGylation strategies known in the art can be applied herein.

[0165] The PEG can be bound to a binding protein of the present disclosure via a terminal reactive group (a “spacer”) which mediates a bond between the free amino or carboxyl groups of one or more of the polypeptide sequences and polyethylene glycol. The PEG having the spacer which can be bound to the free amino group includes N-hydroxysuccinylimide polyethylene glycol, which can be prepared by activating succinic acid ester of polyethylene glycol with N-hydroxysuccinylimide.

[0166] In some embodiments, the PEGylation of the binding proteins is facilitated by the incorporation of non-natural amino acids bearing unique side chains to facilitate site specific PEGylation. The incorporation of non-natural amino acids into polypeptides to provide functional moieties to achieve site specific PEGylation of such polypeptides is known in the art. See e.g., Ptacin et al., PCT International Application No. PCT/US2018/045257 filed Aug. 3, 2018 and published Feb. 7, 2019 as International Publication Number WO 2019/028419A1.

[0167] The PEG conjugated to the polypeptide sequence can be linear or branched. Branched PEG derivatives, “star-PEGs” and multi-armed PEGs are contemplated by the present disclosure. Specific embodiments PEGs useful in the practice of the present disclosure include a 10 kDa linear PEG-aldehyde (e.g., Sunbright® ME-100AL, NOF America Corporation, One North Broadway, White Plains, NY 10601 USA), 10 kDa linear PEG-NHS ester (e.g., Sunbright® ME-100CS, Sunbright® ME-100AS, Sunbright® ME-100GS, Sunbright® ME-100HS, NOF), a 20 kDa linear PEG-aldehyde (e.g., Sunbright® ME-200AL, NOF), a 20 kDa linear PEG-NHS ester (e.g., Sunbright® ME-200CS, Sunbright® ME-200AS, Sunbright® ME-200GS, Sunbright® ME-200HS, NOF), a 20 kDa 2-arm branched PEG-aldehyde the 20 kDA PEG-aldehyde comprising two 10 kDA linear PEG molecules (e.g., Sunbright® GL2-200AL3, NOF), a 20 kDa 2-arm branched PEG-NHS ester the 20 kDA PEG-NHS ester comprising two 10 kDA linear PEG molecules (e.g., Sunbright® GL2-200TS, Sunbright® GL200GS2, NOF), a 40 kDa 2-arm branched PEG-aldehyde the 40 kDA PEG-aldehyde comprising two 20 kDA linear PEG molecules (e.g., Sunbright® GL2-400AL3), a 40 kDa 2-arm branched PEG-NHS ester the 40 kDA PEG-NHS ester comprising two 20 kDA linear PEG molecules (e.g., Sunbright® GL2-400AL3, Sunbright® GL2-400GS2, NOF), a linear 30 kDa PEG-aldehyde (e.g., Sunbright® ME-300AL) and a linear 30 kDa PEG-NHS ester.

[0168] In some embodiments, a linker can used to join the binding protein and the PEG molecule. Suitable linkers include “flexible linkers” which are generally of sufficient length to permit some movement between the modified polypeptide sequences and the linked components and molecules. The linker molecules are generally about 6-50 atoms long. The linker molecules may also be, for example, aryl acetylene, ethylene glycol oligomers containing 2-10 monomer units, diamines, diacids, amino acids, or combinations thereof. Suitable linkers can be readily selected and can be of any suitable length, such as 1 amino acid (e.g., Gly), 2, 3, 4, 5, 6, 7, 8, 9, 10, 10-20, 20-30, 30-50 or more than 50 amino acids.

[0169] Examples of flexible linkers include glycine polymers (G)n, glycine-alanine polymers, alanine-serine polymers, glycine-serine polymers (for example, (GmSo)n (SEQ ID NO: 431), (GSGGS)n (SEQ ID NO: 432), (GmSoGm)n (SEQ ID NO: 433), (GmSoGmSoGm)n (SEQ ID NO: 434), (GSGGSm)n (SEQ ID NO: 435), (GSGSmG)n (SEQ ID NO: 436) and (GGGSm)n (SEQ ID NO: 437), and combinations thereof, where m, n, and o are each independently selected from an integer of at least 1 to 20, e.g., 1-18, 216, 3-14, 4-12, 5-10, 1, 2, 3, 4, 5, 6, 7, 8, 9, or 10), and other flexible linkers. Glycine and glycine-serine polymers are relatively unstructured, and therefore may serve as a neutral tether between components. Examples of flexible linkers include, but are not limited to GGSG (SEQ ID NO:3), GGSGG (SEQ ID NO:18), GSGSG (SEQ ID NO:19), GSGGG (SEQ ID NO:20), GGGSG (SEQ ID NO:21), and GSSSG (SEQ ID NO:22). Other examples of flexible linkers are described in Section V.

[0170] Additional examples of flexible linkers include glycine polymers (G)n or glycine-serine polymers (e.g., (GS)n (SEQ ID NO: 438), (GSGGS)n (SEQ ID NO: 439), (GGGS)n (SEQ ID NO: 440) and (GGGGS)n (SEQ ID NO: 441), where n=1 to 50, for example, 1, 2, 3, 4, 5, 6, 7, 8, 9, 10, 10-20, 20-30, 30-50). Exemplary flexible linkers include, but are not limited to GGGS (SEQ ID NO:23), GGGGS (SEQ ID NO:1), GGSG (SEQ ID NO:3), GGSGG (SEQ ID NO:18), GSGSG (SEQ ID NO:19), GSGGG (SEQ ID NO:20), GGGSG (SEQ ID NO:21), and GSSSG (SEQ ID NO:22). A multimer (e.g., 1, 2, 3, 4, 5, 6, 7, 8, 9, 10, 10-20, 20-30, or 30-50) of these linker sequences may be linked together to provide flexible linkers that may be used to conjugate two molecules. Alternative to a polypeptide linker, the linker can be a chemical linker, e.g., a PEG-aldehyde linker. In some embodiments, the binding protein is acetylated at the N-terminus by enzymatic reaction with N-terminal acetyltransferase and, for example, acetyl CoA. Alternatively, or in addition to N-terminal acetylation, the binding protein can be acetylated at one or more lysine residues, e.g., by enzymatic reaction with a lysine acetyltransferase. See, for example Choudhary et al. (2009) Science 325 (5942):834-840.

[0171] In other embodiments, the binding protein can be modified to include an additional polypeptide sequence that functions as an antigenic tag, such as a FLAG sequence. FLAG sequences are recognized by biotinylated, highly specific, anti-FLAG antibodies, as described herein (see e.g., Blanar et al. (1992) Science 256:1014 and LeClair, et al. (1992) PNAS-USA 89:8145). In some embodiments, the binding protein further comprises a C-terminal c-myc epitope tag.

[0172] In some embodiments, the binding protein is expressed as a fusion protein with an albumin molecule (e.g., human serum albumin) which is known in the art to facilitate extended exposure in vivo.

[0173] In some embodiment, the binding proteins (including fusion proteins of the binding proteins) of the present disclosure are expressed as a fusion protein with one or more transition metal chelating polypeptide sequences. The incorporation of such a transition metal chelating domain facilitates purification immobilized metal affinity chromatography (IMAC) as described in Smith, et al. U.S. Pat. No. 4,569,794 issued Feb. 11, 1986. Examples of transition metal chelating polypeptides useful in the practice of the present disclosure are described in Smith, et al. supra and Dobeli, et al. U.S. Pat. No. 5,320,663 issued May 10, 1995, the entire teachings of which are hereby incorporated by reference. Particular transition metal chelating polypeptides useful in the practice of the present disclosure are peptides comprising 3-6 contiguous histidine residues (SEQ ID NO: 443) such as a six-histidine peptide (His)₆ (SEQ ID NO: 442) and are frequently referred to in the art as “His-tags.”

[0174] The foregoing fusion proteins may be readily produced by recombinant DNA methodology by techniques known in the art by constructing a recombinant vector comprising a nucleic acid sequence comprising a nucleic acid sequence encoding the binding protein in frame with a nucleic acid sequence encoding the fusion partner either at the N-terminus or C-terminus of the binding protein, the sequence optionally further comprising a nucleic acid sequence in frame encoding a linker or spacer polypeptide.

### VII. Pharmaceutical Composition

[0175] The binding proteins of the present disclosure may be administered to a subject in a pharmaceutically acceptable dosage form. The preferred formulation depends on the intended mode of administration and therapeutic application. Pharmaceutical dosage forms of the binding proteins described herein comprise physiologically acceptable carriers that are inherently non-toxic and non-therapeutic. Examples of such carriers include ion exchangers, alumina, aluminum stearate, lecithin, serum proteins, such as human serum albumin, buffer substances such as phosphates, glycine, sorbic acid, potassium sorbate, partial glyceride mixtures of saturated vegetable fatty acids, water, salts, or electrolytes such as protamine sulfate, disodium hydrogen phosphate, potassium hydrogen phosphate, sodium chloride, zinc salts, colloidal silica, magnesium trisilicate, polyvinyl pyrrolidone, cellulose-based substances, and PEG. Carriers for topical or gel-based forms of polypeptides include polysaccharides such as sodium carboxymethylcellulose or methylcellulose, polyvinylpyrrolidone, polyacrylates, polyoxyethylene-polyoxypropylene-block polymers, PEG, polymeric amino acids, amino acid copolymers, and lipid aggregates (such as oil droplets or liposomes).

[0176] The pharmaceutical compositions may also comprise pharmaceutically-acceptable, non-toxic carriers, excipients, stabilizers, or diluents, which are defined as vehicles commonly used to formulate pharmaceutical compositions for animal or human administration. The diluent is selected so as not to affect the biological activity of the combination. Acceptable carriers, excipients, or stabilizers are non-toxic to recipients at the dosages and concentrations employed, and include buffers such as phosphate, citrate, and other organic acids; antioxidants including ascorbic acid and methionine; preservatives (such as octadecyidimethylbenzyl ammonium chloride; hexamethonium chloride; benzalkonium chloride, benzethonium chloride; phenol, butyl or benzyl alcohol; alkyl parabens such as methyl or propyl paraben; catechol; resorcinol; cyclohexanol; 3-pentanol; and m-cresol); low molecular weight (less than about 10 residues) polypeptides; proteins, such as serum albumin, gelatin, or immunoglobulins; hydrophilic polymers such as polyvinylpyrrolidone; amino acids such as glycine, glutamine, asparagine, histidine, arginine, or lysine; monosaccharides, disaccharides, and other carbohydrates including glucose, mannose, or dextrins; chelating agents such as EDTA; sugars such as sucrose, mannitol, trehalose or sorbitol; salt-forming counter-ions such as sodium; metal complexes (e.g., Zn-protein complexes); and/or non-ionic surfactants such as TWEEN™, PLURONICS™ or polyethylene glycol (PEG).

[0177] Formulations to be used for in vivo administration are typically sterile. Sterilization of the compositions of the present disclosure may readily accomplished by filtration through sterile filtration membranes.

[0178] Typically, compositions are prepared as injectables, either as liquid solutions or suspensions; solid forms suitable for solution in, or suspension in, liquid vehicles prior to injection can also be prepared. The preparation also can be emulsified or encapsulated in liposomes or micro particles such as polylactide, polyglycolide, or copolymer for enhanced adjuvant effect, as discussed above (Langer, Science 249: 1527, 1990 and Hanes, Advanced Drug Delivery Reviews 28: 97-119, 1997). The agents of this disclosure can be administered in the form of a depot injection or implant preparation which can be formulated in such a manner as to permit a sustained or pulsatile release of the active ingredient. The pharmaceutical compositions are generally formulated as sterile, substantially isotonic and in full compliance with all Good Manufacturing Practice (GMP) regulations of the U.S. Food and Drug Administration.

[0179] Administration of a binding protein described herein may be achieved through any of a variety of art recognized methods including but not limited to the topical, intravascular injection (including intravenous or intraarterial infusion), intradermal injection, subcutaneous injection, intramuscular injection, intraperitoneal injection, intracranial injection, intratumoral injection, intranodal injection, transdermal, transmucosal, iontophoretic delivery, intralymphatic injection (Senti and Kundig (2009) Current Opinions in Allergy and Clinical Immunology 9(6):537-543), intragastric infusion, intraprostatic injection, intravesical infusion (e.g., bladder), respiratory inhalers including nebulizers, intraocular injection, intraabdominal injection, intralesional injection, intraovarian injection, intracerebral infusion or injection, intracerebroventricular injection (ICVI), and the like. In some embodiments, administration includes the administration of the binding protein itself (e.g., parenteral), as well as the administration of a recombinant vector (e.g., viral or non-viral vector) to cause the in situ expression of the binding protein in the subject. Alternatively, a cell, such as a cell isolated from the subject, could also be recombinantly modified to express the binding protein of the present disclosure.

[0180] The dosage of the pharmaceutical compositions depends on factors including the route of administration, the disease to be treated, and physical characteristics, e.g., age, weight, general health, of the subject. Typically, the amount of a binding protein contained within a single dose may be an amount that effectively prevents, delays, or treats the disease without inducing significant toxicity. A pharmaceutical composition of the disclosure may include a dosage of a binding protein described herein ranging from 0.01 to 500 mg/kg (e.g., from 0.01 to 450 mg, from 0.01 to 400 mg, from 0.01 to 350 mg, from 0.01 to 300 mg, from 0.01 to 250 mg, from 0.01 to 200 mg, from 0.01 to 150 mg, from 0.01 to 100 mg, from 0.01 to 50 mg, from 0.01 to 10 mg, from 0.01 to 1 mg, from 0.1 to 500 mg/kg, from 1 to 500 mg/kg, from 5 to 500 mg/kg, from 10 to 500 mg/kg, from 50 to 500 mg/kg, from 100 to 500 mg/kg, from 150 to 500 mg/kg, from 200 to 500 mg/kg, from 250 to 500 mg/kg, from 300 to 500 mg/kg, from 350 to 500 mg/kg, from 400 to 500 mg/kg, or from 450 to 500 mg/kg) and, in a more specific embodiment, about 1 to about 100 mg/kg (e.g., about 1 to about 90 mg/kg, about 1 to about 80 mg/kg, about 1 to about 70 mg/kg, about 1 to about 60 mg/kg, about 1 to about 50 mg/kg, about 1 to about 40 mg/kg, about 1 to about 30 mg/kg, about 1 to about 20 mg/kg, about 1 to about 10 mg/kg, about 10 to about 100 mg/kg, about 20 to about 100 mg/kg, about 30 to about 100 mg/kg, about 40 to about 100 mg/kg, about 50 to about 100 mg/kg, about 60 to about 100 mg/kg, about 70 to about 100 mg/kg, about 80 to about 100 mg/kg, or about 90 to about 100 mg/kg). In some embodiments, a pharmaceutical composition of the disclosure may include a dosage of a binding protein described herein ranging from 0.01 to 20 mg/kg (e.g., from 0.01 to 15 mg/kg, from 0.01 to 10 mg/kg, from 0.01 to 8 mg/kg, from 0.01 to 6 mg/kg, from 0.01 to 4 mg/kg, from 0.01 to 2 mg/kg, from 0.01 to 1 mg/kg, from 0.01 to 0.1 mg/kg, from 0.01 to 0.05 mg/kg, from 0.05 to 20 mg/kg, from 0.1 to 20 mg/kg, from 1 to 20 mg/kg, from 2 to 20 mg/kg, from 4 to 20 mg/kg, from 6 to 20 mg/kg, from 8 to 20 mg/kg, from 10 to 20 mg/kg, from 15 to 20 mg/kg). The dosage may be adapted by the physician in accordance with conventional factors such as the extent of the disease and different parameters of the subject.

[0181] A pharmaceutical composition containing a binding protein described herein can be administered to a subject in need thereof, for example, one or more times (e.g., 1-10 times or more) daily, weekly, monthly, biannually, annually, or as medically necessary. Dosages may be provided in either a single or multiple dosage regimens. The timing between administrations may decrease as the medical condition improves or increase as the health of the patient declines. A course of therapy may be a single dose or in multiple doses over a period of time. In some embodiments, a single dose is used. In some embodiments, two or more split doses administered over a period of 1, 2, 3, 4, 5, 6, 7, 8, 9, 10, 11, 12, 13, 14, 21, 28, 30, 60, 90, 120 or 180 days are used. Each dose administered in such split dosing protocols may be the same in each administration or may be different. Multi-day dosing protocols over time periods may be provided by the skilled artisan (e.g., physician) monitoring the administration, taking into account the response of the subject to the treatment including adverse effects of the treatment and their modulation as discussed above.

### VIII. Indications

[0182] Neoplastic Diseases

[0183] The present disclosure provides methods of use of binding proteins in the treatment of subjects suffering from a neoplastic disease by the administration of a therapeutically effective amount of a binding protein (or nucleic acid encoding a binding protein including recombinant vectors encoding binding proteins) as described herein.

[0184] The compositions and methods of the present disclosure are useful in the treatment of subject suffering from a neoplastic disease characterized by the presence neoplasms, including benign and malignant neoplasms, and neoplastic disease. Examples benign neoplasms amenable to treatment using the compositions and methods of the present disclosure include but are not limited to adenomas, fibromas, hemangiomas, and lipomas. Examples of pre-malignant neoplasms amenable to treatment using the compositions and methods of the present disclosure include but are not limited to hyperplasia, atypia, metaplasia, and dysplasia. Examples of malignant neoplasms amenable to treatment using the compositions and methods of the present disclosure include but are not limited to carcinomas (cancers arising from epithelial tissues such as the skin or tissues that line internal organs), leukemias, lymphomas, and sarcomas typically derived from bone fat, muscle, blood vessels or connective tissues). Also included in the term neoplasms are viral induced neoplasms such as warts and EBV induced disease (i.e., infectious mononucleosis), scar formation, hyperproliferative vascular disease including intimal smooth muscle cell hyperplasia, restenosis, and vascular occlusion and the like.

[0185] The term “neoplastic disease” includes cancers characterized by solid tumors and non-solid tumors including but not limited to breast cancers; sarcomas (including but not limited to osteosarcomas and angiosarcomas and fibrosarcomas), leukemias, lymphomas, genitourinary cancers (including but not limited to ovarian, urethral, bladder, and prostate cancers); gastrointestinal cancers (including but not limited to colon esophageal and stomach cancers); lung cancers; myelomas; pancreatic cancers; liver cancers; kidney cancers; endocrine cancers; skin cancers; and brain or central and peripheral nervous (CNS) system tumors, malignant or benign, including gliomas and neuroblastomas, astrocytomas, myelodysplastic disorders; cervical carcinoma-in-situ; intestinal polyposes; oral leukoplakias; histiocytoses, hyperprofroliferative scars including keloid scars, hemangiomas; hyperproliferative arterial stenosis, psoriasis, inflammatory arthritis; hyperkeratoses and papulosquamous eruptions including arthritis.

[0186] The term neoplastic disease includes carcinomas. The term “carcinoma” refers to malignancies of epithelial or endocrine tissues including respiratory system carcinomas, gastrointestinal system carcinomas, genitourinary system carcinomas, testicular carcinomas, breast carcinomas, prostatic carcinomas, endocrine system carcinomas, and melanomas. The term neoplastic disease includes adenocarcinomas. An “adenocarcinoma” refers to a carcinoma derived from glandular tissue or in which the tumor cells form recognizable glandular structures.

[0187] The term “hematopoietic neoplastic disorders” refers to neoplastic diseases involving hyperplastic/neoplastic cells of hematopoietic origin, e.g., arising from myeloid, lymphoid or erythroid lineages, or precursor cells thereof. Myeloid neoplasms include, but are not limited to, myeloproliferative neoplasms, myeloid and lymphoid disorders with eosinophilia, myeloproliferative/myelodysplastic neoplasms, myelodysplastic syndromes, acute myeloid leukemia and related precursor neoplasms, and acute leukemia of ambiguous lineage. Exemplary myeloid disorders amenable to treatment in accordance with the present disclosure include, but are not limited to, acute promyeloid leukemia (APML), acute myelogenous leukemia (AML) and chronic myelogenous leukemia (CML). Lymphoid neoplasms include, but are not limited to, precursor lymphoid neoplasms, mature B-cell neoplasms, mature T-cell neoplasms, Hodgkin's Lymphoma, and immunodeficiency-associated lymphoproliferative disorders. Exemplary lymphic disorders amenable to treatment in accordance with the present disclosure include, but are not limited to, acute lymphoblastic leukemia (ALL) which includes B-lineage ALL and T-lineage ALL, chronic lymphocytic leukemia (CLL), prolymphocytic leukemia (PLL), hairy cell leukemia (HLL) and Waldenstrom's macroglobulinemia (WM).

[0188] In some instances, the hematopoietic neoplastic disorder arises from poorly differentiated acute leukemias (e.g., erythroblastic leukemia and acute megakaryoblastic leukemia). As used herein, the term “hematopoietic neoplastic disorders” refers malignant lymphomas including, but are not limited to, non-Hodgkins lymphoma and variants thereof, peripheral T cell lymphomas, adult T-cell leukemia/lymphoma (ATL), cutaneous T cell lymphoma (CTCL), large granular lymphocytic leukemia (LGF), Hodgkin's disease and Reed-Steinberg disease.

[0189] The determination of whether a subject is “suffering from a neoplastic disease” refers to a determination made by a physician with respect to a subject based on the available information accepted in the field for the identification of a disease, disorder or condition including but not limited to X-ray, CT-scans, conventional laboratory diagnostic tests (e.g., blood count, etc.), genomic data, protein expression data, immunohistochemistry, that the subject requires or will benefit from treatment.

[0190] The determination of efficacy of the methods of the present disclosure in the treatment of cancer is generally associated with the achievement of one or more art recognized parameters such as reduction in lesions particularly reduction of metastatic lesion, reduction in metastatsis, reduction in tumor volume, improvement in ECOG score, and the like. Determining response to treatment can be assessed through the measurement of biomarker that can provide reproducible information useful in any aspect of binding protein therapy, including the existence and extent of a subject's response to such therapy and the existence and extent of untoward effects caused by such therapy. The response to treatment may be characterized by improvements in conventional measures of clinical efficacy may be employed such as Complete Response (CR), Partial Response (PR), Stable Disease (SD) and with respect to target lesions, Complete Response (CR),” Incomplete Response/Stable Disease (SD) as defined by RECIST as well as immune-related Complete Response (irCR), immune-related Partial Response (irPR), and immune-related Stable Disease (irSD) as defined Immune-Related Response Criteria (irRC) are considered by those of skill in the art as evidencing efficacy in the treatment of neoplastic disease in mammalian (e.g., human) subjects.

[0191] Infectious Diseases

[0192] The present disclosure provides methods of use of binding proteins in the treatment of subjects suffering from an infectious disease by the administration of a therapeutically effective amount of a binding protein (or nucleic acid encoding an binding protein including recombinant vectors encoding binding proteins) as described herein.

[0193] In some embodiments the infection is a chronic infection, i.e., an infection that is not cleared by the host immune system within a period of up to 1 week, 2 weeks, etc. In some cases, chronic infections involve integration of pathogen genetic elements into the host genome, e.g., retroviruses, lentiviruses, Hepatitis B virus, etc. In other cases, chronic infections, for example certain intracellular bacteria or protozoan pathogens, result from a pathogen cell residing within a host cell. Additionally, in some embodiments, the infection is in a latent stage, as with herpes viruses or human papilloma viruses.

[0194] Viral pathogens of interest include without limitation, retroviral, hepadna, lentiviral, etc. pathogens, e.g., HIV-1; HIV-2, HTLV, FIV, SIV, etc., Hepatitis A, B, C, D, E virus, etc. In some embodiments, the methods of the invention involve diagnosis of a patient as suffering from an infection; or selection of a patient previously diagnosed as suffering from an infection; treating the patient with a regimen of variant type III interferon therapy, optionally in combination with an additional therapy; and monitoring the patient for efficacy of treatment. Monitoring may measure clinical indicia of infection, e.g., fever, white blood cell count, etc., and/or direct monitoring for presence of the pathogen. Treatment may be combined with other active agents. Cytokines may also be included, e.g., interferon γ, tumor necrosis factor α, interleukin 12, etc. Antiviral agents, e.g., acyclovir, gancyclovir, etc., may also be used in treatment. Subjects suspected of having an infection, including an HCV infection, can be screened prior to therapy. Further, subjects receiving therapy may be tested in order to assay the activity and efficacy of the treatment. Significant improvements in one or more parameters is indicative of efficacy. It is well within the skill of the ordinary healthcare worker (e.g., clinician) to adjust dosage regimen and dose amounts to provide for optimal benefit to the patient according to a variety of factors (e.g., patient-dependent factors such as the severity of the disease and the like, the compound administered, and the like). For example, HCV infection in an individual can be detected and/or monitored by the presence of HCV RNA in blood, and/or having anti-HCV antibody in their serum. Other clinical signs and symptoms that can be useful in diagnosis and/or monitoring of therapy include assessment of liver function and assessment of liver fibrosis (e.g., which may accompany chronic viral infection).

[0195] Subjects for whom the therapy described herein can be administered include naïve individuals (e.g., individuals who are diagnosed with an infection, but who have not been previously treated) and individuals who have failed prior treatment (“treatment failure” patients). For HCV therapy, previous treatment includes, for example, treatment with IFN-α monotherapy (e.g., IFN-α and/or PEGylated IFN-α) or IFN-α combination therapy, where the combination therapy may include administration of IFN-α and an antiviral agent such as ribavirin. Treatment failure patients include non-responders (i.e., individuals in whom the HCV titer was not significantly or sufficiently reduced by a previous treatment for HCV to provide a clinically significant response, e.g., a previous IFN-α monotherapy, a previous IFN-α and ribavirin combination therapy, or a previous pegylated IFN-α and ribavirin combination therapy); and relapsers (i.e., individuals who were previously treated for HCV (e.g., who received a previous IFN-α monotherapy, a previous IFN-α and ribavirin combination therapy, or a previous pegylated IFN-α and ribavirin combination therapy), in whom the HCV titer decreased to provide a clinically significant response, but in whom the decreased HCV titer was not maintained due to a subsequent increase in HCV titer).

[0196] Other subjects for whom the therapy disclosed herein is of interest include subject who are“difficult to treat” subjects due to the nature of the HCV infection. “Difficult to treat” subjects are those who 1) have high-titer HCV infection, which is normally defined as an HCV titer of at least about 10⁵, at least about 5×10⁵, or at least about 10⁶ or more genome copies of HCV per milliliter of serum, 2) are infected with HCV of a genotype that is recognized in the field as being associated with treatment failure (e.g., HCV genotype 1, subtypes thereof (e.g., 1a, 1b, etc.), and quasispecies thereof or 3) both.

[0197] In other embodiment methods are provided for treating or reducing primary or metastatic cancer in a regimen comprising contacting a subject in need of treatment with a therapeutically effective amount or an effective dose of IFN λ synthekines or IFN λ variant polypeptides. Effective doses for the treatment of cancer vary depending upon many different factors, including means of administration, target site, physiological state of the patient, whether the patient is human or an animal, other medications administered, and whether treatment is prophylactic or therapeutic. Usually, the patient is a human, but nonhuman mammals may also be treated, e.g., companion animals such as dogs, cats, horses, etc., laboratory mammals such as rabbits, mice, rats, etc., and the like. Treatment dosages can be titrated to optimize safety and efficacy.

[0198] In prophylactic applications, a relatively low dosage may be administered at relatively infrequent intervals over a long period of time. Some patients continue to receive treatment for the rest of their lives. In other therapeutic applications, a relatively high dosage at relatively short intervals is sometimes required until progression of the disease is reduced or terminated, and preferably until the patient shows partial or complete amelioration of symptoms of disease. Thereafter, the patent can be administered a prophylactic regime.

[0199] In still other embodiments, methods of the present invention include treating, reducing or preventing tumor growth, tumor metastasis or tumor invasion of cancers including carcinomas, hematologic cancers, melanomas, sarcomas, gliomas, particularly cancers of epithelial origin that express IFN λR1 and IFNAR1 or IFNAR2, or IL-10Rβ and IFNAR1 or IFNAR2. In some embodiments a cancer is assessed for responsiveness to an IFN λ synthekine by determining whether the cancer expresses the cognate receptors that the synthekine activates, e.g., determining the expression of IFN λR1, and IFNAR1 or IFNAR2. Tissues known to express IFN λR1 include, for example, lung, heart, liver (hepatocytes), prostate, keratinocytes and melanocytes. Cancers responsive to IFN λ and IFN λ synthekines may include, without limitation, melanoma, fibrosarcoma, hepatocellular carcinoma, bladder carcinoma, Burkitt's lymphoma, colorectal carcinoma, glioblastoma, non-small cell lung cancer, esophageal carcinoma, and osteosarcoma, among others.

[0200] For prophylactic applications, pharmaceutical compositions or medicaments are administered to a patient susceptible to, or otherwise at risk of disease in an amount sufficient to eliminate or reduce the risk, lessen the severity, or delay the outset of the disease, including biochemical, histologic and/or behavioral symptoms of the disease, its complications and intermediate pathological phenotypes presenting during development of the disease.

### EXAMPLES

### Example 1—VₕH Generation

[0201] Camels were acclimated at research facility for at least 7 days before immunization. Antigen was diluted with 1×PBS (antigen total about 1 mg). The quality of the antigen was assessed by SDS-PAGE to ensure purity (e.g., >80%). For the first time, 10 mL CFA (then followed 6 times using IFA) was added into mortar, then 10 mL antigen in 1×PBS was slowly added into the mortar with the pestle grinding. The antigen and CFA/IFA were ground until the component showed milky white color and appeared hard to disperse. Camels were injected with antigen emulsified in CFA subcutaneously at at least six sites on the body, injecting about 2 mL at each site (total of 10 mL per camel). A stronger immune response was generated by injecting more sites and in larger volumes. The immunization was conducted every week (7 days), for 7 times. The needle was inserted into the subcutaneous space for 10 to 15 seconds after each injection to avoid leakage of the emulsion. Alternatively, a light pull on the syringe plunger also prevented leakage. The blood sample was collected three days later after 7^{th} immunization.

[0202] After immunization, the library was constructed. Briefly, RNA was extracted from blood and transcribed to cDNA. The V_{H}H regions were obtained via two-step PCR, which fragment about 400 bp. The PCR outcomes and the vector of pMECS phagemid were digested with Pst I and Not I, subsequently, ligated to pMECS/Nb recombinant. After ligation, the products were transformed into Escherichia coli (E. coli) TG1 cells by electroporation. Then, the transformants were enriched in growth medium and planted on plates. Finally, the library size was estimated by counting the number of colonies.

[0203] Library biopanning was conducted to screen candidates against the antigens after library construction. Phage display technology was applied in this procedure. Positive colonies were identified by PE-ELISA.

### Example 2. Generation of Anti-hIL10R VHHs

[0204] Camels were immunized with the extracellular domains of the human IL10Rα (amino acids 22-235, UniProtKB Q13651, hIL-10Rα_{ecd}) and IL10Rβ (amino acids 20-220, UniProtKB Q08334, hIL-10β_{ecd}) weekly for seven weeks and PBMCs harvested on day 52. Phage display libraries were constructed and biopanning conducted as described in Example 1 above. 50 VHH sequences were obtained after selection on hIL10-R1 and 47 VHH sequences were obtained after selection on hIL10-R2. Sequences were clonotyped using germline assignment and CDR3 sequence similarity.

### Example 3. Synthesis of DNA Encoding Synthekines

[0205] Seven unique anti-hIL-10Rα_{ecd} sequences (SEQ ID Nos: 44-50) and seven unique anti-hIL-10Rβ_{ecd} sequences (SEQ ID Nos: 51-57) were selected from each cohort and DNA was synthesized consisting of one IL-10Rα VHH encoding DNA and one IL-10Rβ VHH encoding DNA separated by a linker sequence by GGGS (SEQ ID NO:23) encoding DNA. DNA was for each possible VHH combination and in both orientations for a total of 98 7×7×2=98 VHH dimers. An Ala-Ser (“AS”) linker followed by His-6 (SEQ ID NO: 442) DNA (ASH6, SEQ ID NO: 430) was added at the 3′ end of each DNA construct. The codon optimized DNA sequences encoding these constructs are provided as SEQ ID Nos: 290-237 and the orientation of components thereof are described in Table 2 of the specification above.

### Example 4. Recombinant Production and Purification

[0206] Codon optimized DNA inserts (SEQ ID Nos: 290-237) and cloned into modified pcDNA3.4 (Genscript) for small scale expression in HEK293 cells in 24 well plates. Supernatants The cells The IL2R binding proteins were purified in substantial accordance with the following procedure. Using a Hamilton Star automated system, 96×4 ml of supernatants in 4×24-well blocks were re-arrayed into 4×96-well, 1 mL blocks. PhyNexus micropipette tips (Biotage, San Jose CA) holding 80 uL of Ni-Excel IMAC resin (Cytiva) are equilibrated wash buffer: PBS pH 7.4, 30 mM imidazole. PhyNexus tips were dipped and cycled through 14 cycles of 1 mL pipetting across all 4×96-well blocks. PhyNexus tips were washed in 2×1 mL blocks holding wash buffer. PhyNexus tips were eluted in 3×0.36 mL blocks holding elution buffer: PBS pH 7.4, 400 mM Imidazole. PhyNexus tips were regenerated in 3×1 mL blocks of 0.5 M sodium hydroxide.

[0207] The purified protein eluates were quantified using a Biacore® T200 as in substantial accordance with the following procedure. 10 uL of the first 96×0.36 mL eluates were transferred to a Biacore® 96-well microplate and diluted to 60 uL in HBS-EP+ buffer (10 mM Hepes pH 7.4, 150 mM NaCl, 1 mM EDTA, 0.05% Tween 20). Each of the 96 samples was injected on a CM5 series S chip previously functionalized with anti-histidine capture antibody (Cytiva): injection is performed for 18 seconds at 5 uL/min. Capture levels were recorded 60 seconds after buffer wash. A standard curve of known VHH concentrations (270, 90, 30, 10, 3.3, 1.1 μg/mL) was acquired in each of the 4 Biacore chip flow cells to eliminate cell-to-cell surface variability. The 96 captures were interpolated against the standard curve using a non-linear model including specific and unspecific, one-site binding. Concentrations in the first elution block varied from 12 to 452 μg/mL corresponding to a 4-149 μg. SDS-PAGE analysis of 5 randomly picked samples was performed to ensure molecular weight of eluates corresponded to expected values (˜30 KDa).

[0208] The concentration of the proteins was normalized using the Hamilton Star automated system in substantial accordance with the following procedure. Concentration values are imported in an Excel spreadsheet where pipetting volumes were calculated to perform dilution to 50 μg/mL in 0.22 mL. The spreadsheet was imported in a Hamilton Star method dedicated to performing dilution pipetting using the first elution block and elution buffer as diluent. The final, normalized plate was sterile filtered using 0.22 μm filter plates (Corning) and the material used for the following in vitro assays.

### Example 5. IL10 Activity Assay

[0209] HEK-Blue™ IL-10 reporter cell line (Invivogen, San Diego CA) was used for screening the IL10R1/R2 VHHs. HEK-Blue™ IL-10 cells were generated by stable transfection of the human embryonic kidney HEK293 cell line with the genes encoding hIL-10Rα and R chains, human STAT3, and the STAT3-inducible SEAP (secreted embryonic alkaline phosphatase) reporter. Binding of IL-10 to its receptor on the surface of HEK-Blue™ IL-10 cells triggers JAK1/STAT3 signaling and the subsequent production of SEAP. The signal was then detected by quantifying SEAP activity in the cell culture supernatant using a QUANTI-Blue™ development solution (Invivogen, San Diego CA) and the absorbance values were measured spectrophotometrically at 630 nm. Because STAT3 is also implicated in the signaling of cytokines such as IFN-α/β and IL-6, HEK-Blue™ IL-10 cells are knockout for the expression of hIFNAR2 and hIL-6R.

### Example 6. Screening of SEQ ID NOs: 192-289

[0210] To screen the IL10R1/R2 VHHs, HEK-Blue™ IL-10 cells were seeded in a 96-well plate at 50,000 cells per well and treated with either 25 nM or 100 nM protein (in triplicates) for 24 hours. Recombinant Animal-Free Human IL-10 (Shenandoah Biotechnology, Inc. Warwick, PA Catalog No. 100-83AF) was used as a positive control and unstimulated cells were used as a negative control. 24 hours post treatment, 20 μl of the cell supernatant was transferred to a flat-bottom 96 well plate and the assay was developed by adding 180 μl of the QUANTI-Blue™ (Invivogen) for 2 hours. The absorbance values were measured at 630 nm on the Envision® (PerkinElmer, Waltham MA) multilabel plate reader. The results of this screening are presented in Table 3 of the specification.

INFORMAL SEQUENCE LISTING

| SEQ | | |
|---|---|---|
| ID | | |
| NO | Notes | Amino Acid or DNA Sequence |
| 1 | linker | GGGGS |
| 2 | linker | GGGGGS |
| 3 | linker | GGSG |
| 4 | linker | SGGG |
| 5 | linker | GSGS |
| 6 | linker | GSGSGS |
| 7 | linker | GSGSGSGSGS |
| 8 | linker | GSGSGSGSGSGS |
| 9 | linker | GGSGGS |
| 10 | linker | GGSGGSGGS |
| 11 | linker | GGSGGSGGSGGS |
| 12 | linker | GGSGGGSG |
| 13 | linker | GGSGGGSGGGSG |
| 14 | linker | GGSGGGSGGGSGGGSG |
| 15 | linker | GGSGGGSGGGSGGGSGGGSG |
| 16 | linker | GGGGSGGGGS |
| 17 | linker | GGGGSGGGGSGGGGS |
| 18 | linker | GGSGG |
| 19 | linker | GSGSG |
| 20 | linker | GSGGG |
| 21 | linker | GGGSG |
| 22 | linker | GSSSG |
| 23 | linker | GGGS |
| 24 | Anti-gp130 V_{H}H | VAAIWPGGGLTVYADSVKGRFTISRDHAKNTLYLQ |
| | | MNNLKPEDTAMYYCAAQVQLQESGGGSVQAGGSLR |
| | | LSCTASGAIASGYIDSRWCMAWFRQAPGKEREGGS |
| | | PRMCPSLEFGFDYWGQGTQVTVSS |
| 25 | Anti-gp130 V_{H}H | SDGTTRYADSVKGRFTISQGTAKNTVYLQMNSLQP |
| | | EDTAMYYCKTVCVVGSRQVQLQESGGGSVQAGGSL |
| | | RLSCVASASTYCTYDMHWYRQAPGKGREFVSAIDW |
| | | SDYWGQGTQVTVSS |
| 26 | Anti-gp130 V_{H}H | DGTTGYADSVKGRFTISKDKAKDTVYLQMNSLKPE |
| | | DTGMYSCKTKDGTIATMQVQLQESGGGSVQAGGSL |
| | | RLSCTAPGFTSNSCGMDWYRQAPGKEREFVSSIST |
| | | ELCDFGYWGQGTQVTVSS |
| 27 | Anti-gp130 V_{H}H | TGDGRTYYADSVKGRFTISRDNAKNTVDLQMSSLK |
| | | PEDTAMYYCAARAAPLYQVQLQESGGGSVQAGGSL |
| | | RLSCAASGYPYSNGYMGWFRQAPGKEREGVATIYS |
| | | SGSPLTRARYNVWGQGTQVTVSS |
| 28 | Anti-gp130 V_{H}H | SDGSTYYADSVKGRFTITRDNAKNTVYLQMNSLKP |
| | | EDTAIYYCSANCYRRLRNQVQLQESGGGSVQAGGS |
| | | LTLSCAASEYAYSTCNMGWYRQAPGKERELVSAFI |
| | | YWGQGTQVTVSS |
| 29 | Anti-gp130 V_{H}H | SGANAFYADSVKGRFTISRDNAKNTLYLQMNSLKP |
| | | EDTATYYCKRGHACAGYQVQLQESGGGLVQPGGSL |
| | | RLSCTASGLTFDDSVMGWFRQAPGKGREAVSCISS |
| | | YPIPYDDYWGQGTQVTVSS |
| 30 | Anti-I12Rb/Anti- | QVQLQESGGGSVQAGGSLRLSCAASGYEYCRIHMT |
| | CD122 V_{H}H | WYRQGPGKEREFVSSIGSDGRKTYANSVTGRFTIS |
| | | RDNANHTVYLQMNSLSPEDTAMYYCKTEYLYGLGC |
| | | PDGSAYWGQGTQVTVSS |
| 31 | Anti-I12Rb/Anti- | QVQLQESGGGSVQAGGSLRLSCAASEYTASRYCMA |
| | CD 122 V_{H}H | WFRQAPGKEREGVAAIHPGGGTTYYADSVKGRFSI |
| | | SQDSADNTLYLQMNSLKPEDTAMYYCAAGSLWVPF |
| | | GDRCAANYWGQGTQVTVSS |
| 32 | Anti-I12Rb/Anti- | QVQLQESGGGLVQPGGSLRLSCVASGFTFSNYWIF |
| | CD122 V_{H}H | WVRQAAGKGLEWLSTSNTGGDTTKYADSVKGRFTI |
| | | SRDSAKNTEYLQMNSLKPEDTAVYYCETGRCARSG |
| | | GYQGTQVTVSS |
| 33 | Anti-I12Rb/Anti- | QVQLQESGGGSVQVGGSLRLSCATSGDTKSIRCMG |
| | CD122 V_{H}H | WFRQTPGKEREGIAAIDREGFATYADSVYDRFTIA |
| | | QDNAQNTLYLEMNALKPEDTAMYYCAAQNMCRVVR |
| | | GAMTGVDYWGKGTQVTVSS |
| 34 | Anti-I12Rb/Anti- | QVQLQESGGGSVQVGGSLKLSCAASGYTYSSYYCM |
| | CD122 V_{H}H | GWFRQAPGKEREGVAAIDSDGSTSYADSVKGRFTI |
| | | SQDDAKNTLYLQMNSLKPEDTAMYYCAASYEVVDC |
| | | YPSGYGQDYWGKGTQVTVSS |
| 35 | Anti-I12Rb/Anti- | QVQLQESGGGSVQAGGSLRLSCVGSGYTYDTSDMS |
| | CD122 V_{H}H | WYRQAPGKEREFVSDIDSGDWAAYADAVKGRFTIS |
| | | RDNAKKTVYLQMNSLEPEDTAMYYCKASYWKWGKL |
| | | NNFWGPGTQVTVSS |
| 36 | Anti-I12Rb/Anti- | QVQLQESGGGLVQPGGSLKLSCAASGFRFSNYGMS |
| | CD122 V_{H}H | WVRQAPGEGLEWVSYINGDGSRTHYADSVKGRFTI |
| | | SRDNAKNTLYLQLNSLKTEDTAMYYCEKGLSRDGW |
| | | SLSAASRGQGTQVTVSS |
| 37 | Anti-I12Rb/Anti- | QVQLQESGGGSVQTGGSLRLSCAVSGYTTYSFNYM |
| | CD122 V_{H}H | GWFRQAPGKEREGVAVIYTGGGSTLYADSVKGRFT |
| | | ISQDNAKNTVYLQMNSLKPEDTAMYYCAADDQRFA |
| | | SPLYAYFGYWGQGTQVTVSS |
| 38 | Anti- IL2Rgamma/ | DGGSTAYAASVEGRFTISRDNAKSTLYLQLNSLKT |
| | Anti-CD132 | EDTAMYYCTKGYGDGTPQVQLQESGGGLVQPGGSL |
| | | RLSCTASGFSFSSYPMTWARQAPGKGLEWVSTIAS |
| | | APGQGTQVTVSS |
| 39 | Anti- IL2Rgamma/ | GGGTFYADSVKGRFTISRDNAKNTLYLQLNSLKAE |
| | Anti-CD132 | DTAMYYCATNRLHYYSDQVQLQESGGGLVQPGGSL |
| | | RLSCAASGFTFSSAHMSWVRQAPGKGREWIASIYS |
| | | DDSLRGQGTQVTVSS |
| 40 | Anti- IL2Rgamma/ | DGSTYYADSVKGRFTISQDNAKNTVYLQMDSVKPE |
| | Anti-CD132 | DTAVYYCAADFMIAIQAQVQLQESGGGSVQAGGSL |
| | | RLSCTASGFTFDDREMNWYRQAPGNECELVSTISS |
| | | PGAGCWGQGTQVTVSS |
| 41 | Anti- IL2Rgamma/ | RSIYYADSVKGRFTISQDNAKNTLYLQMNSLKPED |
| | Anti-CD132 | IAMYSCAAGGYSWSAGCEQVQLQESGGGSVQAGGS |
| | | LRLSCVASGYTSCMGWFRQAPGKEREAVATIYTRG |
| | | FNYWGQGTQVTVSS |
| 42 | Anti- IL2Rgamma/ | DGSTYYADSVKGRFTISQDNAKNTVYLQMNSLKPE |
| | Anti-CD132 | DTAVYYCAAEPRGYYSNQVQLQESGGGSVQAGGSL |
| | | RLSCTASGFTFDDSDMGWYRQAPGNECELVSTISS |
| | | YGGRRECNYWGQGTQVTVSS |
| 43 | Anti- IL2Rgamma/ | GGSTYYADSVKGRFTISQDNAKNTLYLQMNSLKPE |
| | Anti-CD132 | DTAMYYCAAAWVACLEQVQLQESGGGSVQAGGSLR |
| | | LSCVASGYTFSSYCMGWFRQAPGKEREGVAALGFG |
| | | GSWYDLARYKHWGQGTQVTVSS |
| 44 | Anti-IL10Rα | QVQLQESGGGSVQAGGSLRLSCAASRYLYSIDYMA |
| | | WFRQSPGKEREPVAVIYTASGATFYPDSVKGRFTI |
| | | SQDNAKMTVYLQMNSLKSEDTAMYYCAAVRKTDSY |
| | | LFDAQSFTYWGQGTQVTVSS |
| 45 | Anti-IL10Rα | QVQLQESGGGSVQAGGSLRLSCAASRFTYSSYCMG |
| | | WFRQAPGKEREGVASIDSDGSTSYTDSVKGRFTIS |
| | | KDNAKNTLYLQMNSLKPEDTAMYYCALDLMSTVVP |
| | | GFCGFLLSAGMDYWGKGTQVTVSS |
| 46 | Anti-IL10Rα | QVQLQESGGGSVQAGGSLRLSCAASGYTYSMYCMG |
| | | WFRQAPGKEREGVAQINSDGSTSYADSVKGRFTIS |
| | | KDNAKNTLYLQMNSLKPEDTAMYYCAADSRVYGGS |
| | | WYERLCGPYTYEYNYWGQGTQVTVSS |
| 47 | Anti-IL10Rα | QVQLQESGGGSVQAGGSLRLSCAVSGYAYSTYCMG |
| | | WFRQAPGKEREGVAAIDSGGSTSYADSVKGRFTIS |
| | | KDNAKNTLYLRMNSLKPEDTAMYYCAAVPPPPDGG |
| | | SCLFLGPEIKVSKADFRYWGQGTQVTVSS |
| 48 | Anti-IL10Rα | QVQLQESGGGSVQAGGSLRLSCTVSGYTYSSNCMG |
| | | WFRQAPGKEREGVATIYTGGGNTYYADSVKGRFTI |
| | | SQDNAKNTVYLQMNNLKPEDTAMYYCAAEPLSRVY |
| | | GGSCPTPTFDYWGQGTQVTVSS |
| 49 | Anti-IL10Rα | QVQLQESGGGSVQAGGSLRLSCGASGYTYSSYCMG |
| | | WFRQVPGKEREGVAVIDSDGSTSYADSVKGRFTIS |
| | | KDNGKNTLYLQMNSLKPEDTAMYYCAADLGHYRPP |
| | | CGVLYLGMDYWGKGTQVTVSS |
| 50 | Anti-IL10Rα | QVQLQESGGGSVQAGGSLRLSCAASGYSNCSYDMT |
| | | WYRQAPGKEREFVSAIHSDGSTRYADSVKGRFFIS |
| | | QDNAKNTVYLQMNSLKPEDTAMYYCKTDPLHCRAH |
| | | GGSWYSVRANYWGQGTQVTVSS |
| 51 | Anti-IL10Rβ | QVQLQESGGGSVQAGGSLRLSCAASGYTYS |
| | | SGCMGWFRQAPGKEREAVAAINSDGSTSYA |
| | | DSVKGRFTISKDNAKNTLYLQMNSLKPEDT |
| | | AMYYCAAEPYCSGGYPRWSVAEFGYWGQGT |
| | | QVTVSS |
| 52 | Anti-IL10Rβ | QVQLQESGGGSVQAGGSLRLSCAASGYTYS |
| | | SYCMGWFRQAPGKEREGVAHIDSDGSTSYA |
| | | DSVKGRFTISKDNAKNTLYLQMNSLKPEDT |
| | | AMYYCAADPIPGPGYCDGGPNKYWGQGTQV |
| | | TVSS |
| 53 | Anti-IL10Rβ | QVQLQESGGGSVQAGGSLRLSCAASRYTYN |
| | | SYCMGWFRQAPGKEREGVATIDSDGMTRYA |
| | | DSVKGRFTISKDNAKNTLYLQMNSLKPEDT |
| | | AMYYCAADADCTIAAMTTNPLGQGTQVTVS |
| | | S |
| 54 | Anti-IL10Rβ | QVQLQESGGGSVQAGGSLRLSCTVSRYTAS |
| | | VNYMGWFRQAPGKEREGVATIFTGAGTTYY |
| | | ANSVKGRFTISRDNAKNTAYLQMNSLKPED |
| | | TAIYYCAVDFRGGLLYRPAYEYTYRGQGTQ |
| | | VTVSS |
| 55 | Anti-IL10Rβ | QVQLQESGGGSVEAGGSLRLSCAASGYTHS |
| | | SYCMGWFRQAPGKEREGVAAIDVDGSTTYA |
| | | DSVKGRFTISKDNAKNTLYLQMNSLKPEDT |
| | | GMYYCAAEFADCSSNYFLPPGAVRYWGQGT |
| | | QVTVSS |
| 56 | Anti-IL10Rβ | QVQLQESGGGSVQAGGSLRLSCAASGYSYS |
| | | SYCMGWFRQAPGKEREGVATIDSDGMTRYA |
| | | DSVKGRFTISKDNAKNTLYLQMNSLKPEDT |
| | | AMYYCAAPLYDCDSGAVGRNPPYWGQGTQV |
| | | TVSS |
| 57 | Anti-IL10Rβ | QVQLQESGGGSVQTGGSLRLSCAASGYTYL |
| | | RGCMGWFRQAPGKEREGVAVMDVVGDRRSY |
| | | IDSVKGRFTISRDNAANSVYLQMDNLKPED |
| | | TAMYYCTAGPNCVGWRSGLDYWGQGTQVTV |
| | | SS |
| 58 | Anti-IL12Rβ2 | QVQLQESGGGSVQAGGSLRLSCAASGFTVT |
| | | RYCMGWLRQAPGKQREGVAIIERDGRTGYA |
| | | DSVKGRFTISKDNAKNTLYLQMNSLKPEDT |
| | | AMYYCGAIEGSCRPDFGYRGQGTQVTVSS |
| 59 | Anti-IL12Rβ2 | QVQLQESGGGSVQAGGSLRLSCTASGLTFD |
| | | DVEMAWYRQGPGDDYDLVSSINTDSRVYYV |
| | | DSVKDRFTISRDNAKNTLYLQMNNLKPEDT |
| | | AVYYCAADPWGGDLRGYPNYWGQGTQVTVS |
| | | S |
| 60 | Anti-IL12Rβ2 | QVQLQESGGGLVQAGGSLRLSCQASGYTYG |
| | | LFCMGWFRQVSGKKREGVAVVDSPGGRHVA |
| | | DSLKGRFTISKDNANNILYLDMTNLKSEDT |
| | | ATYYCAADPEKYCFLFSDAGYQYWGQGTQV |
| | | TVSS |
| 61 | Anti-IL12Rβ2 | QVQLQESGGGSVQAGGSLRLSCAASGVTYS |
| | | RYCMGWFRQAPGLERERVAHIYSRGIITYY |
| | | TDSVKGRFTISQDSAKKTVYLQMNSLKPED |
| | | TAMYYCAATRETYGGSGDCGYESVYNYWAQ |
| | | GTQVTVSS |
| 62 | Anti-IL12Rβ2 | QVQLQESGGGLVQPGGSLKLSCAASGFTFS |
| | | TYAMSWVRQAPGKEPEWISRISSGGGNTYY |
| | | ADAVKGRFAISRDNAKNTLYLQLNSLKTED |
| | | TAIYVCTMDDYYGGSWHPISRGHGTQVTVS |
| | | S |
| 63 | Anti-IL12Rβ2 | QVQLQESGGGSVQAGGSLRLSCSASGFTVD |
| | | DFAMGWYRQAPGNECELVSTISSGGSTYYA |
| | | DSVKGRFTISQDSAKNTVYLQMNSLKPEDT |
| | | AVYYCAPSSVGCPLGYWGQGTQVTVSS |
| 64 | Anti-IL23R | QVQLQESGGGSVQAGGSLRLSCAASGFTVT |
| | | RYCMGWLRQAPGKQREGVAIIERDGRTGYA |
| | | DSVKGRFTISKDNAKNTLYLQMNSLKPEDT |
| | | AMYYCGAIEGSCRPDFGYRGQGTQVTVSS |
| 65 | Anti-IL23R | QVQLQESGGGSVQAGGSLRLSCTASGLTFD |
| | | DVEMAWYRQGPGDDYDLVSSINTDSRVYYV |
| | | DSVKDRFTISRDNAKNTLYLQMNNLKPEDT |
| | | AVYYCAADPWGGDLRGYPNYWGQGTQVTVS |
| | | S |
| 66 | Anti-IL23R | QVQLQESGGGLVQAGGSLRLSCQASGYTYG |
| | | LFCMGWFRQVSGKKREGVAVVDSPGGRHVA |
| | | DSLKGRFTISKDNANNILYLDMTNLKSEDT |
| | | ATYYCAADPEKYCFLFSDAGYQYWGQGTQV |
| | | TVSS |
| 67 | Anti-IL23R | QVQLQESGGGSVQAGGSLRLSCAASGVTYS |
| | | RYCMGWFRQAPGLERERVAHIYSRGIITYY |
| | | TDSVKGRFTISQDSAKKTVYLQMNSLKPED |
| | | TAMYYCAATRETYGGSGDCGYESVYNYWAQ |
| | | GTQVTVSS |
| 68 | Anti-IL23R | QVQLQESGGGLVQPGGSLKLSCAASGFTFS |
| | | TYAMSWVRQAPGKEPEWISRISSGGGNTYY |
| | | ADAVKGRFAISRDNAKNTLYLQLNSLKTED |
| | | TAIYVCTMDDYYGGSWHPISRGHGTQVTVS |
| | | S |
| 69 | Anti-IL23R | QVQLQESGGGSVQAGGSLRLSCSASGFTVD |
| | | DFAMGWYRQAPGNECELVSTISSGGSTYYA |
| | | DSVKGRFTISQDSAKNTVYLQMNSLKPEDT |
| | | AVYYCAPSSVGCPLGYWGQGTQVTVSS |
| 70 | Anti-IL27Ralpha | VAYGITSYADSVKGRFTISRDNTKNTLYLQ |
| | | LNSLKTEDTAIYYCVKHSGTTIPRQVQLQE |
| | | SGGGLVQPGESLRLSCTASGFTFSNYAMSW |
| | | VRQAPGKGLEWVSGINGFISYTKRGQGTQV |
| | | TVSS |
| 71 | Anti-IL27Ralpha | GGDTTLYADSVKGRFTSSRDNAKNTLYLQL |
| | | NSLKTEDTAIYYCAKRIDCNSGYQVQLQES |
| | | GGGSVQVGGSLRLSCAASGFTFSSYPMSWV |
| | | RQAPGKGLEWISTISACYRRNYWGQGTQVT |
| | | VSS |
| 72 | Anti-IL27Ralpha | WVGGMLYFADSVKGRFTVSQDQAKNTLYLQ |
| | | MNSLKPEDTAMYYCAAESVSSQVQLQESGG |
| | | GSVQAGGSLRLSCRASGSTYSNYCLGWFRQ |
| | | ITGKEREGVAVINFSCGGWLTRPDRVPYWG |
| | | QGTQVTVSS |
| 73 | Anti-IL27Ralpha | GTGSTSYAASVKGRFTASQDKGKNIAYLQM |
| | | NSLKPEDTAMYYCKASCVRGRGQVQLQESG |
| | | GGSVQAGGSLRLSCVASGYVSCDYFLPSWY |
| | | RQAPGKEREFVSIIDISEYWGQGTQVTVSS |
| 74 | Anti-IL27Ralpha | IYTVGGSIFYADSVRGRFTISQDATKNMFY |
| | | LQMNTLKPEDTAMYYCAAASGRLQVQLQES |
| | | GGGSVQSGGSLRLSCAASGFTYSTSNSWMA |
| | | WFRQAPGKEREGVAARGKWFWPYEYNYWGQ |
| | | GTQVTVSS |
| 75 | Anti-IL27Ralpha | GGASTYYTDSVKGRFTISRDNAKNMLYLQL |
| | | NSLKTEDTAMYYCAKGGSGYGDQVQLQESG |
| | | GGLVQPGGSLRLSCAASGFTFSHSGMSWVR |
| | | QAPGKGLEWVSTINSASRMTSPGSQGTQVT |
| | | VSS |
| 76 | Anti-IL28Ralpha | DGSTSYADSVKGRFTISKDNAKNTLYLQMN |
| | | SLRPEDTAMYYCAADGEYNDYVQVQLQESG |
| | | GGSVQSGGSLRLSCAASGFTYSSYCMGWFR |
| | | QAPGKEREGVAAIDSCWSTGLRYRGQGTQV |
| | | TVSS |
| 77 | Anti-IL28Ralpha | RDGSTFYPDSVKGRFTISRDNAKNTLYLQL |
| | | NSLKTEDTAMYYCAKEEPGSSSRQVQLQES |
| | | GGGLVQPGGSLRLSCVASGFTFSDYAMSWV |
| | | RQAPGMGLERVSAIGGQGTQVTVSS |
| 78 | Anti-IL28Ralpha | SDGTTSYADSVKERFTISKDNAKNILYLQM |
| | | NSLKPEDTARYYCAATALLLGRGQVQLQES |
| | | GGGSVQAGGSLRLSCAVSRYTISRSDCMGW |
| | | FRQAPGKEREGVARIGSACHKEVSVFSWWG |
| | | QGTQVTVSS |
| 79 | Anti-IL28Ralpha | SGGDDTFYTDSVKGRFTISRDNAKNTLYLQ |
| | | MNSLKTEDTAMYYCAMGASGMIQVQLQESG |
| | | GGLVQPGGSLRLSCAASGFTFSNYGMSWVR |
| | | QAPGKGLEWVSGINPRGQGTQITVSS |
| 80 | Anti-IL28Ralpha | TSGGAVVYADSVKGRFTISQDDAKNTMYLQ |
| | | MNSLKPEDTAMYYCAASRAPAPQVQLQESG |
| | | GGSVQLGGSLRLSCLVSGSTDNIKYMGWFR |
| | | QAPGKEREGVAAVYPRLLLQRALVEYWGQG |
| | | TQVTVSS |
| 81 | Anti-IL28Ralpha | QVQLQESGGGLVQPGGSLRLSCAASGFTFS |
| | | NATMSWVRQAPGKEIEWVSAISNSRGTKYY |
| | | AAFVKGRFTISRDNAKNTLYLQLNNLKTED |
| | | TAMYYCTKDWKTSYSDYDLSDGQGTQVTVS |
| | | S |
| 82 | Anti-IL28Ralpha | RDGKTYYGDSVKGRFAISRDNAKNTLYLQM |
| | | NSLKPEDTAMYYCAAGPPPCITSQVQLQES |
| | | GGGSVQAGGSLRLSCASSGYISSSYCMAWF |
| | | RQAPGKEREGAAGVTMPAGGDYGYRYWGQG |
| | | TQVTVSS |
| 83 | Anti- | QVQLQESGGALVQPGGSLRLSCAASGFTFS |
| | mouseGp130 | YYAMKWVRQAPGKGLEWVSSISGGGGATYY |
| | | ADSVKGRFTISRDNTNDTLYLQMNSLKTED |
| | | TAVYYCAAQNLDYRGQGTQVTVSS |
| 84 | Anti- | QVQLQESGGGLVQPGGSLRLSCTASGFTFN |
| | mouseGp130 | SAHLKWERQPPGKGLEWVSFITNGGASTGY |
| | | ADSVKGRFTISRDDAKNTLYLQMNNLKTED |
| | | TAVYYCATGGLRGQGTQVTVSS |
| 85 | Anti- | QVQLQESGGGLVQPGGSLRLSCAASGFTLS |
| | mouseGp130 | TYWMYWVRQAPGKGPEWVSAVSRGGFNTYY |
| | | ADSVKGRFTISRDNAKNTVYLQMNSLKPED |
| | | TAVYYCMSSVSFYGWPPDRVPSPTGQGTQV |
| | | TVSS |
| 86 | Anti- | QVQLQESGGGSVQPGGSLRLSCAASGFTFS |
| | mouseGp130 | TYDMSWVRQAPGKGLEWVSTINYSGSSTYY |
| | | VDSVLGRFTIARDNAKNTLYLQMNNLQTED |
| | | TAVYYCASVKERRSNGHPIVFGDRGQGTQV |
| | | TVSS |
| 87 | Anti- | QVQLQESGGGLVQPGGSLRLSCAASGFTFR |
| | mouseGp130 | NYAMSWVRQAPGKGLEWVSAINSGGGSTYY |
| | | ADSVKGRFTISRDNAKNTLYLQMNSLKPED |
| | | TAMYYCAKHVTGDYDPSLRYEYNYWSQGTQ |
| | | VTVSS |
| 88 | Anti- | QVQLQESGGGSVQAGGSLRLSCVISGFTYR |
| | mouseGp130 | QTFMGWFRQVVGKEREGVAAISTGGGSTIY |
| | | ADSVKGRFTISQDSSKDTVYLEMNGLKLED |
| | | TGMYYCAASTVITSESINRNLYQYWGQGTQ |
| | | VTVSS |
| 89 | Anti- | QVQLQESGGGSVQAGGFLRLSCAFSGYTGC |
| | mouseGp130 | MGWFRQGPGQEREGVASINDGGSLTYADSV |
| | | KGRFTISKDNAKKTLDLQMNTLKPEDTAMY |
| | | YCAASLSYCLNPTLRVDGYNYWGQGTQVTV |
| | | SS |
| 90 | Anti- | QVQLQESGGGLVQPGGSLRLSCAASGFTFS |
| | IL2Rbeta/anti- | LYDMSWVRQAPGKGLEWVSGINSGGYSTYY |
| | CD122 (mouse) | AASAKGRFTISRDNAKNTLYLQLSSVKTED |
| | | TAMYYCAQRGLTSPYVIPNIRLOGTQVTVS |
| | | S |
| 91 | Anti- | QVQLQESGGGLVQPGGSLRLSCAASEFTFS |
| | IL2Rbeta/anti- | NNWMHWVRQAPGKGFEWVSSIHSGMAITHY |
| | CD 122 (mouse) | RGSVKGRFTISSDIAKNIVSLQMNSLKAED |
| | | TAVYYCVGEGNWGQGTQVTVSS |
| 92 | Anti- | QVQLQESGGGSVLAGGSLRLSCVASGYGYN |
| | IL2Rgamma/Anti- | YIGWFRQTPGKEREGVAVIYTGGGDTYYAD |
| | CD132 | SVKGRFTASRDNAKSTLYLQMNSLEPEDTA |
| | (mouse) | MYYGVARYCVGSVYACLRGGHDEYAHWGQG |
| | | TQVTVSS |
| 93 | Anti- | QVQLQESGGGSVQPGGSLRLSCAASGSTYA |
| | IL2Rgamma/Anti- | NYLMGWFRQAPGKEREGVAAIYSGGGSTYY |
| | CD132 | ADSVKGRFTISQDNAKNTLYLQMNSLKPED |
| | (mouse) | TAMYYCAAASAVKGDKGDIVVVVTGTQRME |
| | | YDYWGHGTQVTVSS |
| 94 | Anti- | QVQLQESGGGSVQAGASLRLSCSVSGFTFD |
| | IL2Rgamma/Anti- | ESVMSWLRQGPGNECDAVAIISSDDNTYYD |
| | CD132 | DSVKGRFTISEDNAKNMVYLQMNSLKPEDT |
| | (mouse) | AVYYCAARRRRPVYDSDYELRPRPLCGDFG |
| | | VWGQGTQVTVSS |
| 95 | Anti- | QVQLQESGGGSVQAGGSLRLSCIGSGLPFD |
| | IL2Rgamma/Anti- | EDDMGWYRQAPGNECELVSSISSDGTAYYA |
| | CD132 | DSVKGRFTISRDNAKNTVLLQMNSLKPEDT |
| | (mouse) | AVYYCAAGVHRQFGGSSSCGDAFYGMDYWG |
| | | KGTQVTVSS |
| 96 | Anti- | QVQLQESGGGSVQAGGSLRLSCVASGDVYG |
| | IL2Rgamma/Ant | RNSMAWFRQAPGKEREGVAVGYSVVTTTYY |
| | i-CD132 | ADSVKGRFTISEDNDKNTVYLEMNSLKPED |
| | (mouse) | TAMYYCAADGNLWRGLRPSEYTYWGQGTQV |
| | | TVSS |
| 97 | Anti- | QVQLQESGGGSVQAGGSLRLSCTASGFTFD |
| | IL2Rgamma/Anti- | DFDMGWYRQAPGNECELVSTISDDGSTYYA |
| | CD132 | DSVKGRSSISRDNAKNTVYLQMNRLKPEDT |
| | (mouse) | GVYYCAAEGALGSKMNCGWVGNFGYWGQGT |
| | | QVTVSS |
| 98 | Anti- | QVQLQESGGGSVQAGGSLRLSCATSGFPYS |
| | IL2Rgamma/Anti- | RYCMGWFRQAPGKEREGVAAIEPDGSTSYA |
| | CD132 | DSVKGRFTISQDNAVNTLYLQMNNLKPEDT |
| | (mouse) | AMYYCAADERCFYLKDYDLRRPAQYRYWGQ |
| | | GTQVTVSS |
| 99 | Anti-IL10Rbeta | QVQLQESGGGSVQAGGSLRLSCAASGYTYN |
| | (mouse) | RRFMGWFRQAPGKEREGLAIIYTPNSSTFY |
| | | ADSVTGRFTISQDSARNTVYLQMNSLKPED |
| | | TAMYYCAAARIASMTELSVRDMDYWGKGTQ |
| | | VTVSS |
| 100 | Anti-IL10Rbeta | QVQLQESGGGSVQAGGSLRLSCTASRYIAL |
| | (mouse) | NACMAWIRQAPGSEREVVATIVTDGSRTYY |
| | | ADSVKGRFTISQDNAKNTMYLQMNGLKPED |
| | | TAMYYCAADRRCPVSRAPYEYELRYWGQGT |
| | | QVTVSS |
| 101 | Anti-IL10Rbeta | QVQLQESGGGSVQAGGSLRLSCVASGDTYS |
| | (mouse) | RKYIAWVRQVPGKEREGVAVMYTPGSATYY |
| | | TDTVMGRFTISQDNAKNTVYLQMNSLKPED |
| | | TAMYFCAAKASGSMFNFRDYTYWGQGTQVT |
| | | VSS |
| 102 | Anti-IL10Rbeta | QVQLQESGGGSVQAGGALRLSCTASGYTAS |
| | (mouse) | SICMGWFRQAPGKERERVAVITTAASGTYY |
| | | ADSVNGRFSISQNNAKNTVYLQMNSLKPDD |
| | | TAMYYCAATRRGGDCLDPLQTPAYNTWGQG |
| | | TQVTVSS |
| 103 | Anti-IL10Rbeta | QVQLQESGGGSVQAGGSLRLSCATSGYASC |
| | (mouse) | SRAMRWYRQAPGKEREFVAYIDGVGSTGYA |
| | | DSVKGRFTISQDNAKYTAYLQMNSLKPEDT |
| | | AMYYCNRGCRADGSNSLDNYWGQGTQVTVS |
| | | S |
| 104 | Anti-IL10Rbeta | QVQLQESGGGSVQAGGSLRLSCAASGYTYN |
| | (mouse) | GKCMAWFRQAPGKEREVVAGIYTGGSSTYY |
| | | ADSVKGRFTISQDNAKNTVYLQMDSLKPED |
| | | TAMYYCATSRSCSDLRRRSIAYWGQGTQVT |
| | | VSS |
| 105 | Anti-IL12Rbeta1 | QVQLQESGGGSVQAGGSLRLSCTASGYTYS |
| | (mouse) | SAFMAWFRQAPGKEREGVAAIYTRDGGTVY |
| | | ADSVKGRFTISQDNAKNTLYLQMNSLKAED |
| | | TAMYYCAAKIPQPGRASLLDSQTYDYWGQG |
| | | TQVTVSS |
| 106 | Anti-IL12Rbeta1 | QVQLQESGGGSVQAGGSLRLSCAVSGYDYC |
| | (mouse) | GYDVRWYRQAPGKEREFVSGIDSDGSTSYA |
| | | DSVKGRFTISQDNAENTSYLHMFSLKPEDT |
| | | AMYYCKTESPAGESAWCRNFRGMDYWGKGT |
| | | QVTVSS |
| 107 | Anti-IL12Rbeta1 | QVQLQESGGGSVQAGGSLRLSCVASGYSYC |
| | (mouse) | GYDMMWYRQAPGKEREFVALITSDYSIRYE |
| | | DSVEGRFSISRDNAKNTGYLLMSNLTPADT |
| | | AIYYCKTSTAARESSWCRSRYRVASWGQGT |
| | | QVTVSS |
| 108 | Anti-IL12Rbeta1 | QVQLQESGGGSVQAGGSLRLSCAASRYTYT |
| | (mouse) | NNFMAWFRQAPGKEREGVAAIYTGDGYAYY |
| | | FDSVKGRFTISQDNDKNMLYLQMNSLKPED |
| | | TAMYYCAAMERRSGRRRMTENAEYKYWGQG |
| | | TQVTVSS |
| 109 | Anti-IL12Rbeta1 | QVQLQESGGGSVQAGETLRLSCTVSGFTID |
| | (mouse) | DSEMGWYRQAPGHECELVASGSSDDDTYYV |
| | | DSVKGRFTISLDNAKNMVYLQMNSLKPEDT |
| | | AVYYCATGPTYPPKDGDCAHWGQGTQVTVS |
| | | S |
| 110 | Anti-IL12Rbeta1 | QVQLQESGGGSVQAGGSLRLSCTASGYTYS |
| | (mouse) | SAFMAWFRQAPGKEREGVAAIYTRDGSPVY |
| | | ADSLKGRFTISQDNAKNTLHLQMNSLKPED |
| | | TAMYYCAAKIPEPGRISLLDSQTYDYWGHG |
| | | TQVTVSS |
| 111 | Anti-IL12Rbeta1 | QVQLQESGGGSVQAGGSLRLSCAVSGYDYC |
| | (mouse) | GYDVRWYRRAPGKEREFVSGIDSDGSTSYA |
| | | DSVKGRFTISQDNAENTSYLHMFSLKPEDT |
| | | AMYYCKTESPAGESAWCRNFRGMDYWGKGT |
| | | QVTVSS |
| 112 | Anti-IL12Rbeta2 | QVQLQESGGGSVQAGGSLRLSCAASGYTYS |
| | (mouse) | NRHMGWFRQAPGKEREGVAAIYTGGGSTYY |
| | | ADSVKDRFTISQDNAKNTLYLQMNSLTPED |
| | | TAMYYCAADLTRWYSGGWRDPRGYKYWGQG |
| | | TQVTVS(303) |
| 113 | Anti-IL12Rbeta2 | QVQLQESGGGSVQAGGSLRLSCAASGVTYG |
| | (mouse) | SYYMAAWFRQAPGKEREGVASIYGGSDSTY |
| | | YADSVLGRFTISQDNGKNTLYLQMNSLKPD |
| | | DTAMYYCAAAPPGKWFLKRLEGHNYSYWGQ |
| | | GTQVTVSS |
| 114 | Anti-IL12Rbeta2 | QVQLQESGGGSVQVGGSLRLSCAASGFTYS |
| | (mouse) | SSCLGWFRQAPGKEREGVATIYPAGGNIFY |
| | | ADSVKGRFTISQDNAKNTVYLQMDSLKPED |
| | | TAMYYCAARGGQTWGSGGNRCSLWLPAYNY |
| | | WGQGTQVTVSS |
| 115 | Anti-IL12Rbeta2 | QVQLQESGGGSVQVGGSLRLSCAVSGKLYG |
| | (mouse) | GAWFRQAQGKGREGVAAIWIGTGTTFYADS |
| | | VKGRFTISRDNAKNTVYLQMDGLKPEDTAL |
| | | YYCAADDRPGYRDPLAPVSYNHWGQGTQVT |
| | | VSS |
| 116 | Anti-IL12Rbeta2 | QVQLQESGGGSVQAGGSLRLSCAASGITYR |
| | (mouse) | GVWMGWFRQAPGKEREGVATIYTGSGHTYY |
| | | ADSVKGRFTISQDNAKNTVYLQMNSLKPED |
| | | TAMYYCAARTVGGTFYTLAADSFNTWGQGT |
| | | QVTVSS |
| 117 | Anti-IL12Rbeta2 | QVQLQESGGGSVQDGGSLRLSCAASGDIYA |
| | (mouse) | RNCMGWFRQAPGKEREKIAVADTGGRSPYY |
| | | ADSVKGRFTISRDNAKNTVDLQMNSLKPED |
| | | TAVYYCAAGPLVPVVNTAARCVYEYWGQGT |
| | | QVTVSS |
| 118 | Anti-il23R | QVQLQESGGGSVQAGGSLRLSCAASGYTYS |
| | mouse | SCTMGWYRQAPGKERELVSMLISDGSTFYA |
| | | DSVKGRFTFSQEYAKNTVYLQMNSLKPEDT |
| | | AMYYCGCATLGSRTVWGQGTQVTVSS |
| 119 | Anti-il23R | QVQLQESGGGSVQAGGSLTLSCTAPGFTFR |
| | mouse | LAAMRWVRQAPGKGLEWVSGIDSRGSTIYA |
| | | DSVKGRFTISKDNAKNTLYLQLNSLKTEDT |
| | | AMYYCAQGVYGDTYSGSQGTQVTVSS |
| 120 | Anti-il23R | QVQLQESGGGSVQAGGSLRLSCTASVNTYC |
| | mouse | EYNMSWYRQAPGKEREFVSGVDSDGSTRYS |
| | | ESVKGRFTISQDNAKNTMYLQMNGLKPEDT |
| | | AMYYCKTYVCTFCSGNSCYYEYKYYYEGQG |
| | | TQVTVSS |
| 121 | Anti-il23R | QVQLQESGGGSVQAGGSLRLSCAASGYTYS |
| | mouse | NNCMGWFRQAPGKDRERIANIYTGGGRTTY |
| | | ADSVKGRFTISQDSAKSTVYLQMNSLKPED |
| | | TAMYYCAAGSCGSARSEYSYWGQGTQVTVS |
| | | S |
| 122 | Anti-il23R | QVQLQESGGGSVQAGGSLRLSCAASGYTFC |
| | mouse | MAWFRQAPGKEREGVARFYTRDGYTYYSDS |
| | | VKGRFTISQNNAKNTLYLQMNSLKSEDTAM |
| | | YYCAADLARCSSNKNDFRYWGQGTQVTVSS |
| 123 | Anti-il23R | QVQLQESGGGSVQAGGSLRLSCAASGYTSG |
| | mouse | NYWMGWFRQAPGKEREGVATLWTGGASTFY |
| | | GDSVKGRFTISRDNFKNTLYLQMNSLKVED |
| | | TAMYYCAADPALRLGANILRPAEYKYWGQG |
| | | TQVTVSS |
| 124 | Anti-il23R | QVQLQESGGGLVQPGGSLRLSCAASGFTFS |
| | mouse | RSAMTWVRQAPGKGLDWVSGIDSGGTTVYA |
| | | DSVKGRFTISRDSAKNTLYLQMNSLKTEDT |
| | | AVYYCAIGLPWGNTWRTRGQGTQVTVSS |
| 125 | Anti-il27R | QVQLQESGGGSVQAGGSLRLSCAVSGDSTY |
| | (mouse) | SMGWFRQPPGKEREGVAAITKDITIHADSV |
| | | KGRFTISKDNAKNTLYLQMNSLKPEDTAMY |
| | | YCAAHRPYGPPLNPRWYTYWGQGTQVTVSS |
| 126 | Anti-il27R | QVQLQESGGGSVQAGGSLRLSCTASGYTSS |
| | (mouse) | RYCMGWFRQTPGKKREGVAAIYTGGGTTFY |
| | | HGSVKGRFTISQDNTTNTVYLQMHNLKPED |
| | | TAMYYCAAGPVTRACDEYNYWGQGTQVTVS |
| | | S |
| 127 | Anti-il27R | QVQLQESGGGSVQAGGSLRLSCAASGYSIN |
| | (mouse) | RMGWFRQAPGKEREGVAAISIGGGQTYYAD |
| | | SVKGRFTISQDNAKNTVDLQMNSLKPEDTA |
| | | MYYCAAGLVYGEAWLDSRHYNKWGQGTQVT |
| | | VSS |
| 128 | Anti-il27R | QVQLQESGGGSVQAGGSLRLSCAGSGYSLS |
| | (mouse) | NYCMGWFRQAPGQGREGVASLRFVSGATFY |
| | | ADSVKGRFTIAQDNAKNTLYLQMNSLKPED |
| | | TAMYYCGIKSRGICGGRLVDVDFGNWGQGT |
| | | QVTVSS |
| 129 | Anti-il27R | QVQLQESGGGSVQAGGSLRLSCAASKNSNF |
| | (mouse) | MGWFRQAPGKEREGVAAMMTKNNNTYYADS |
| | | VKGRFTISHDNAKNTVYLQMDSLKPEDTAV |
| | | YYCAAVYRTRRLRVLEAANFDYWGQGTQVT |
| | | VSS |
| 130 | Anti-il27R | QVQLQESGGGSVQAGGSLRLSCAASGYTYS |
| | (mouse) | SYCMAWFRQAPGKEREGVAAIDSDGSTSYA |
| | | DSVKGRFTISKDNAKNTLYLQMNSLKPEDT |
| | | AMYYCAAASGRCLGPGIRSLIWGQGTQVTV |
| | | SS |
| 131 | IL12Rβ1VHH- | QVQLQESGGGSVQAGGSLRLSCTASGYTYS |
| | GGGS- | SAFMAWFRQAPGKEREGVAAIYTRDGGTVY |
| | IL12Rβ2 V_{H}H | ADSVKGRFTISQDNAKNTLYLQMNSLKAED |
| | | TAMYYCAAKIPQPGRASLLDSQTYDYWGQG |
| | | TQVTVSSGGGSQVQLQESGGGSVQAGGSLR |
| | | LSCAASGYTYSNRHMGWFRQAPGKEREGVA |
| | | AIYTGGGSTYYADSVKDRFTISQDNAKNTL |
| | | YLQMNSLTPEDTAMYYCAADLTRWYSGGWR |
| | | DPRGYKYWGQGTQVTVS |
| | | (SEQ ID NO: 131) |
| 132 | IL12Rβ1VHH- | QVQLQESGGGSVQAGGSLRLSCTASGYTYS |
| | GGGS- | SAFMAWFRQAPGKEREGVAAIYTRDGGTVY |
| | IL12Rβ2VHH | ADSVKGRFTISQDNAKNTLYLQMNSLKAED |
| | | TAMYYCAAKIPQPGRASLLDSQTYDYWGQG |
| | | TQVTVSSGGGSQVQLQESGGGSVQAGGSLR |
| | | LSCAASGVTYGSYYMAAWFRQAPGKEREGV |
| | | ASIYGGSDSTYYADSVLGRFTISQDNGKNT |
| | | LYLQMNSLKPDDTAMYYCAAAPPGKWFLKR |
| | | LEGHNYSYWGQGTQVTVSS |
| | | (SEQ ID NO: 132) |
| 133 | IL12Rβ1VHH- | QVQLQESGGGSVQAGGSLRLSCTASGYTYS |
| | GGGS- | SAFMAWFRQAPGKEREGVAAIYTRDGGTVY |
| | IL12Rβ2 V_{H}H | ADSVKGRFTISQDNAKNTLYLQMNSLKAED |
| | | TAMYYCAAKIPQPGRASLLDSQTYDYWGQG |
| | | TQVTVSSGGGSQVQLQESGGGSVQVGGSLR |
| | | LSCAASGFTYSSSCLGWFRQAPGKEREGVA |
| | | TIYPAGGNIFYADSVKGRFTISQDNAKNTV |
| | | YLQMDSLKPEDTAMYYCAARGGQTWGSGGN |
| | | RCSLWLPAYNYWGQGTQVTVSS |
| | | (SEQ ID NO: 133) |
| 134 | IL12Rβ1VHH- | QVQLQESGGGSVQAGGSLRLSCTASGYTYS |
| | GGGS- | SAFMAWFRQAPGKEREGVAAIYTRDGGTVY |
| | IL12Rβ2 V_{H}H | ADSVKGRFTISQDNAKNTLYLQMNSLKAED |
| | | TAMYYCAAKIPQPGRASLLDSQTYDYWGQG |
| | | TQVTVSSGGGSQVQLQESGGGSVQVGGSLR |
| | | LSCAVSGKLYGGAWFRQAQGKGREGVAAIW |
| | | IGTGTTFYADSVKGRFTISRDNAKNTVYLQ |
| | | MDGLKPEDTALYYCAADDRPGYRDPLAPVS |
| | | YNHWGQGTQVTVSS |
| | | (SEQ ID NO: 134) |
| 135 | IL12Rβ1VHH- | QVQLQESGGGSVQAGGSLRLSCTASGYTYS |
| | GGGS- | SAFMAWFRQAPGKEREGVAAIYTRDGGTVY |
| | IL12R2 V_{H}H | ADSVKGRFTISQDNAKNTLYLQMNSLKAED |
| | | TAMYYCAAKIPQPGRASLLDSQTYDYWGQG |
| | | TQVTVSSGGGSQVQLQESGGGSVQAGGSLR |
| | | LSCAASGITYRGVWMGWFRQAPGKEREGVA |
| | | TIYTGSGHTYYADSVKGRFTISQDNAKNTV |
| | | YLQMNSLKPEDTAMYYCAARTVGGTFYTLA |
| | | ADSFNTWGQGTQVTVSS |
| | | (SEQ ID NO: 135) |
| 136 | IL12Rβ1VHH- | QVQLQESGGGSVQAGGSLRLSCTASGYTYS |
| | GGGS- | SAFMAWFRQAPGKEREGVAAIYTRDGGTVY |
| | IL12Rβ2 V_{H}H | ADSVKGRFTISQDNAKNTLYLQMNSLKAED |
| | | TAMYYCAAKIPQPGRASLLDSQTYDYWGQG |
| | | TQVTVSSGGGSQVQLQESGGGSVQDGGSLR |
| | | LSCAASGDIYARNCMGWFRQAPGKEREKIA |
| | | VADTGGRSPYYADSVKGRFTISRDNAKNTV |
| | | DLQMNSLKPEDTAVYYCAAGPLVPVVNTAA |
| | | RCVYEYWGQGTQVTVSS |
| | | (SEQ ID NO: 136) |
| 137 | IL12Rβ1VHH- | QVQLQESGGGSVQAGGSLRLSCAVSGYDYC |
| | GGGS- | GYDVRWYRQAPGKEREFVSGIDSDGSTSYA |
| | IL12Rβ2 V_{H}H | DSVKGRFTISQDNAENTSYLHMFSLKPEDT |
| | | AMYYCKTESPAGESAWCRNFRGMDYWGKGT |
| | | QVTVSSGGGSQVQLQESGGGSVQAGGSLRL |
| | | SCAASGYTYSNRHMGWFRQAPGKEREGVAA |
| | | IYTGGGSTYYADSVKDRFTISQDNAKNTLY |
| | | LQMNSLTPEDTAMYYCAADLTRWYSGGWRD |
| | | PRGYKYWGQGTQVTVS |
| | | (SEQ ID NO: 137) |
| 138 | IL12Rβ1VHH- | QVQLQESGGGSVQAGGSLRLSCAVSGYDYC |
| | GGGS- | GYDVRWYRQAPGKEREFVSGIDSDGSTSYA |
| | IL12Rβ2 V_{H}H | DSVKGRFTISQDNAENTSYLHMFSLKPEDT |
| | | AMYYCKTESPAGESAWCRNFRGMDYWGKGT |
| | | QVTVSSGGGSQVQLQESGGGSVQAGGSLRL |
| | | SCAASGVTYGSYYMAAWFRQAPGKEREGVA |
| | | SIYGGSDSTYYADSVLGRFTISQDNGKNTL |
| | | YLQMNSLKPDDTAMYYCAAAPPGKWFLKRL |
| | | EGHNYSYWGQGTQVTVSS |
| | | (SEQ ID NO: 138) |
| 139 | IL12Rβ1VHH- | QVQLQESGGGSVQAGGSLRLSCAVSGYDYC |
| | GGGS- | GYDVRWYRQAPGKEREFVSGIDSDGSTSYA |
| | IL12Rβ2 V_{H}H | DSVKGRFTISQDNAENTSYLHMFSLKPEDT |
| | | AMYYCKTESPAGESAWCRNFRGMDYWGKGT |
| | | QVTVSSGGGSQVQLQESGGGSVQVGGSLRL |
| | | SCAASGFTYSSSCLGWFRQAPGKEREGVAT |
| | | IYPAGGNIFYADSVKGRFTISQDNAKNTVY |
| | | LQMDSLKPEDTAMYYCAARGGQTWGSGGNR |
| | | CSLWLPAYNYWGQGTQVTVSS |
| | | (SEQ ID NO: 139) |
| 140 | IL12Rβ1VHH- | QVQLQESGGGSVQAGGSLRLSCAVSGYDYC |
| | GGGS- | GYDVRWYRQAPGKEREFVSGIDSDGSTSYA |
| | IL12Rβ2 V_{H}H | DSVKGRFTISQDNAENTSYLHMFSLKPEDT |
| | | AMYYCKTESPAGESAWCRNFRGMDYWGKGT |
| | | QVTVSSGGGSQVQLQESGGGSVQVGGSLRL |
| | | SCAVSGKLYGGAWFRQAQGKGREGVAAIWI |
| | | GTGTTFYADSVKGRFTISRDNAKNTVYLQM |
| | | DGLKPEDTALYYCAADDRPGYRDPLAPVSY |
| | | NHWGQGTQVTVSS |
| | | (SEQ ID NO: 140) |
| 141 | IL12Rβ1VHH- | QVQLQESGGGSVQAGGSLRLSCAVSGYDYC |
| | GGGS- | GYDVRWYRQAPGKEREFVSGIDSDGSTSYA |
| | IL12Rβ2 V_{H}H | DSVKGRFTISQDNAENTSYLHMFSLKPEDT |
| | | AMYYCKTESPAGESAWCRNFRGMDYWGKGT |
| | | QVTVSSGGGSQVQLQESGGGSVQAGGSLRL |
| | | SCAASGITYRGVWMGWFRQAPGKEREGVAT |
| | | IYTGSGHTYYADSVKGRFTISQDNAKNTVY |
| | | LQMNSLKPEDTAMYYCAARTVGGTFYTLAA |
| | | DSFNTWGQGTQVTVSS |
| | | (SEQ ID NO: 141) |
| 142 | IL12Rβ1VHH- | QVQLQESGGGSVQAGGSLRLSCAVSGYDYC |
| | GGGS- | GYDVRWYRQAPGKEREFVSGIDSDGSTSYA |
| | IL12Rβ2 V_{H}H | DSVKGRFTISQDNAENTSYLHMFSLKPEDT |
| | | AMYYCKTESPAGESAWCRNFRGMDYWGKGT |
| | | QVTVSSGGGSQVQLQESGGGSVQDGGSLRL |
| | | SCAASGDIYARNCMGWFRQAPGKEREKIAV |
| | | ADTGGRSPYYADSVKGRFTISRDNAKNTVD |
| | | LQMNSLKPEDTAVYYCAAGPLVPVVNTAAR |
| | | CVYEYWGQGTQVTVSS |
| | | (SEQ ID NO: 142) |
| 143 | IL12Rβ1VHH- | QVQLQESGGGSVQAGGSLRLSCVASGYSYC |
| | GGGS- | GYDMMWYRQAPGKEREFVALITSDYSIRYE |
| | IL12R2 V_{H}H | DSVEGRFSISRDNAKNTGYLLMSNLTPADT |
| | | AIYYCKTSTAARESSWCRSRYRVASWGQGT |
| | | QVTVSSGGGSQVQLQESGGGSVQAGGSLRL |
| | | SCAASGYTYSNRHMGWFRQAPGKEREGVAA |
| | | IYTGGGSTYYADSVKDRFTISQDNAKNTLY |
| | | LQMNSLTPEDTAMYYCAADLTRWYSGGWRD |
| | | PRGYKYWGQGTQVTVS |
| | | (SEQ ID NO: 143) |
| 144 | IL12Rβ1 V_{H}H | QVQLQESGGGSVQAGGSLRLSCVASGYSYC |
| | -GGGS- | GYDMMWYRQAPGKEREFVALITSDYSIRYE |
| | IL12Rβ2 V_{H}H | DSVEGRFSISRDNAKNTGYLLMSNLTPADT |
| | | AIYYCKTSTAARESSWCRSRYRVASWGQGT |
| | | QVTVSSGGGSQVQLQESGGGSVQAGGSLRL |
| | | SCAASGVTYGSYYMAAWFRQAPGKEREGVA |
| | | SIYGGSDSTYYADSVLGRFTISQDNGKNTL |
| | | YLQMNSLKPDDTAMYYCAAAPPGKWFLKRL |
| | | EGHNYSYWGQGTQVTVSS |
| | | (SEQ ID NO: 144) |
| 145 | IL12Rβ1 V_{H}H | QVQLQESGGGSVQAGGSLRLSCVASGYSYC |
| | -GGGS- | GYDMMWYRQAPGKEREFVALITSDYSIRYE |
| | IL12Rβ2 V_{H}H | DSVEGRFSISRDNAKNTGYLLMSNLTPADT |
| | | AIYYCKTSTAARESSWCRSRYRVASWGQGT |
| | | QVTVSSGGGSQVQLQESGGGSVQVGGSLRL |
| | | SCAASGFTYSSSCLGWFRQAPGKEREGVAT |
| | | IYPAGGNIFYADSVKGRFTISQDNAKNTVY |
| | | LQMDSLKPEDTAMYYCAARGGQTWGSGGNR |
| | | CSLWLPAYNYWGQGTQVTVSS |
| | | (SEQ ID NO: 145) |
| 146 | IL12Rβ1 V_{H}H | QVQLQESGGGSVQAGGSLRLSCVASGYSYC |
| | -GGGS- | GYDMMWYRQAPGKEREFVALITSDYSIRYE |
| | IL12R2 V_{H}H | DSVEGRFSISRDNAKNTGYLLMSNLTPADT |
| | | AIYYCKTSTAARESSWCRSRYRVASWGQGT |
| | | QVTVSSGGGSQVQLQESGGGSVQVGGSLRL |
| | | SCAVSGKLYGGAWFRQAQGKGREGVAAIWI |
| | | GTGTTFYADSVKGRFTISRDNAKNT137VY |
| | | LQMDGLKPEDTALYYCAADDRPGYRDPL |
| | | APVSYNHWGQGTQVTVSS |
| | | (SE138Q ID NO: 149) |
| 147 | IL12Rβ1 V_{H}H | QVQLQESGGGSVQAGGSLRLSCVASGYSYC |
| | -GGGS- | GYDMMWYRQAPGKEREFVALITSDYSIRYE |
| | IL12Rβ2 V_{H}H | DSVEGRFSISRDNAKNTGYLLMSNLTPADT |
| | | AIYYCKTSTAARESSWCRSRYRVASWGQGT |
| | | QVTVSSGGGSQVQLQESGGGSVQAGGSLRL |
| | | SCAASGITYRGVWMGWFRQAPGKEREGVAT |
| | | IYTGSGHTYYADSVKGRFTISQDNAKNTVY |
| | | LQMNSLKPEDTAMYYCAARTVGGTFYTLAA |
| | | DSFNTWGQGTQVTVSS |
| | | (SEQ ID NO: 147) |
| 148 | IL12Rβ1 V_{H}H | QVQLQESGGGSVQAGGSLRLSCVASGYSYC |
| | -GGGS- | GYDMMWYRQAPGKEREFVALITSDYSIRYE |
| | IL12R2 V_{H}H | DSVEGRFSISRDNAKNTGYLLMSNLTPADT |
| | | AIYYCKTSTAARESSWCRSRYRVASWGQGT |
| | | QVTVSSGGGSQVQLQESGGGSVQDGGSLRL |
| | | SCAASGDIYARNCMGWFRQAPGKEREKIAV |
| | | ADTGGRSPYYADSVKGRFTISRDNAKNTVD |
| | | LQMNSLKPEDTAVYYCAAGPLVPVVNTAAR |
| | | CVYEYWGQGTQVTVSS |
| | | (SEQ ID NO: 148) |
| 149 | IL12Rβ1 V_{H}H | QVQLQESGGGSVQAGGSLRLSCAASRYTYT |
| | -GGGS- | NNFMAWFRQAPGKEREGVAAIYTGDGYAYY |
| | IL12Rβ2 V_{H}H | FDSVKGRFTISQDNDKNMLYLQMNSLKPED |
| | | TAMYYCAAMERRSGRRRMTENAEYKYWGQG |
| | | TQVTVSSGGGSQVQLQESGGGSVQAGGSLR |
| | | LSCAASGYTYSNRHMGWFRQAPGKEREGVA |
| | | AIYTGGGSTYYADSVKDRFTISQDNAKNTL |
| | | YLQMNSLTPEDTAMYYCAADLTRWYSGGWR |
| | | DPRGYKYWGQGTQVTVS |
| | | (SEQ ID NO: 149) |
| 150 | IL12Rβ1 V_{H}H | QVQLQESGGGSVQAGGSLRLSCAASRYTYT |
| | -GGGS- | NNFMAWFRQAPGKEREGVAAIYTGDGYAYY |
| | IL12Rβ2 V_{H}H | FDSVKGRFTISQDNDKNMLYLQMNSLKPED |
| | | TAMYYCAAMERRSGRRRMTENAEYKYWGQG |
| | | TQVTVSSGGGSQVQLQESGGGSVQAGGSLR |
| | | LSCAASGVTYGSYYMAAWFRQAPGKEREGV |
| | | ASIYGGSDSTYYADSVLGRFTISQDNGKNT |
| | | LYLQMNSLKPDDTAMYYCAAAPPGKWFLKR |
| | | LEGHNYSYWGQGTQVTVSS |
| | | (SEQ ID NO: 150) |
| 151 | IL12Rβ1 V_{H}H | QVQLQESGGGSVQAGGSLRLSCAASRYTYT |
| | -GGGS- | NNFMAWFRQAPGKEREGVAAIYTGDGYAYY |
| | IL12Rβ2 V_{H}H | FDSVKGRFTISQDNDKNMLYLQMNSLKPED |
| | | TAMYYCAAMERRSGRRRMTENAEYKYWGQG |
| | | TQVTVSSGGGSQVQLQESGGGSVQVGGSLR |
| | | LSCAASGFTYSSSCLGWFRQAPGKEREGVA |
| | | TIYPAGGNIFYADSVKGRFTISQDNAKNTV |
| | | YLQMDSLKPEDTAMYYCAARGGQTWGSGGN |
| | | RCSLWLPAYNYWGQGTQVTVSS |
| | | (SEQ ID NO: 151) |
| 152 | IL12Rβ1 V_{H}H | QVQLQESGGGSVQAGGSLRLSCAASRYTYT |
| | -GGGS- | NNFMAWFRQAPGKEREGVAAIYTGDGYAYY |
| | IL12Rβ2 V_{H}H | FDSVKGRFTISQDNDKNMLYLQMNSLKPED |
| | | TAMYYCAAMERRSGRRRMTENAEYKYWGQG |
| | | TQVTVSSGGGSQVQLQESGGGSVQVGGSLR |
| | | LSCAVSGKLYGGAWFRQAQGKGREGVAAIW |
| | | IGTGTTFYADSVKGRFTISRDNAKNTVYLQ |
| | | MDGLKPEDTALYYCAADDRPGYRDPLAPVS |
| | | YNHWGQGTQVTVSS |
| | | (SEQ ID NO: 152) |
| 153 | IL12Rβ1 V_{H}H | QVQLQESGGGSVQAGGSLRLSCAASRYTYT |
| | -GGGS- | NNFMAWFRQAPGKEREGVAAIYTGDGYAYY |
| | IL12Rβ2 V_{H}H | FDSVKGRFTISQDNDKNMLYLQMNSLKPED |
| | | TAMYYCAAMERRSGRRRMTENAEYKYWGQG |
| | | TQVTVSSGGGSQVQLQESGGGSVQAGGSLR |
| | | LSCAASGITYRGVWMGWFRQAPGKEREGVA |
| | | TIYTGSGHTYYADSVKGRFTISQDNAKNTV |
| | | YLQMNSLKPEDTAMYYCAARTVGGTFYTLA |
| | | ADSFNTWGQGTQVTVSS |
| | | (SEQ ID NO: 153) |
| 154 | IL12Rβ1 V_{H}H | QVQLQESGGGSVQAGGSLRLSCAASRYTYT |
| | -GGGS- | NNFMAWFRQAPGKEREGVAAIYTGDGYAYY |
| | IL12Rβ2 V_{H}H | FDSVKGRFTISQDNDKNMLYLQMNSLKPED |
| | | TAMYYCAAMERRSGRRRMTENAEYKYWGQG |
| | | TQVTVSSGGGSQVQLQESGGGSVQDGGSLR |
| | | LSCAASGDIYARNCMGWFRQAPGKEREKIA |
| | | VADTGGRSPYYADSVKGRFTISRDNAKNTV |
| | | DLQMNSLKPEDTAVYYCAAGPLVPVVNTAA |
| | | RCVYEYWGQGTQVTVSS |
| | | (SEQ ID NO: 154) |
| 155 | IL12Rβ1 V_{H}H | QVQLQESGGGSVQAGETLRLSCTVSGFTID |
| | -GGGS- | DSEMGWYRQAPGHECELVASGSSDDDTYYV |
| | IL12Rβ2 V_{H}H | DSVKGRFTISLDNAKNMVYLQMNSLKPEDT |
| | | AVYYCATGPTYPPKDGDCAHWGQGTQVTVS |
| | | SGGGSQVQLQESGGGSVQAGGSLRLSCAAS |
| | | GYTYSNRHMGWFRQAPGKEREGVAAIYTGG |
| | | GSTYYADSVKDRFTISQDNAKNTLYLQMNS |
| | | LTPEDTAMYYCAADLTRWYSGGWRDPRGYK |
| | | YWGQGTQVTVS |
| | | (SEQ ID NO: 155) |
| 156 | IL12Rβ1 V_{H}H | QVQLQESGGGSVQAGETLRLSCTVSGFTID |
| | -GGGS- | DSEMGWYRQAPGHECELVASGSSDDDTYYV |
| | IL12Rβ2 V_{H}H | DSVKGRFTISLDNAKNMVYLQMNSLKPEDT |
| | | AVYYCATGPTYPPKDGDCAHWGQGTQVTVS |
| | | SGGGSQVQLQESGGGSVQAGGSLRLSCAAS |
| | | GVTYGSYYMAAWFRQAPGKEREGVASIYGG |
| | | SDSTYYADSVLGRFTISQDNGKNTLYLQMN |
| | | SLKPDDTAMYYCAAAPPGKWFLKRLEGHNY |
| | | SYWGQGTQVTVSS |
| | | (SEQ ID NO: 156) |
| 157 | IL12Rβ1 V_{H}H | QVQLQESGGGSVQAGETLRLSCTVSGFTID |
| | -GGGS- | DSEMGWYRQAPGHECELVASGSSDDDTYYV |
| | IL12R2 V_{H}H | DSVKGRFTISLDNAKNMVYLQMNSLKPEDT |
| | | AVYYCATGPTYPPKDGDCAHWGQGTQVTVS |
| | | SGGGSQVQLQESGGGSVQVGGSLRLSCAAS |
| | | GFTYSSSCLGWFRQAPGKEREGVATIYPAG |
| | | GNIFYADSVKGRFTISQDNAKNTVYLQMDS |
| | | LKPEDTAMYYCAARGGQTWGSGGNRCSLWL |
| | | PAYNYWGQGTQVTVSS |
| | | (SEQ ID NO: 157) |
| 158 | IL12Rβ1VHH | QVQLQESGGGSVQAGETLRLSCTVSGFTID |
| | -GGGS- | DSEMGWYRQAPGHECELVASGSSDDDTYYV |
| | IL12Rβ2 V_{H}H | DSVKGRFTISLDNAKNMVYLQMNSLKPEDT |
| | | AVYYCATGPTYPPKDGDCAHWGQGTQVTVS |
| | | SGGGSQVQLQESGGGSVQVGGSLRLSCAVS |
| | | GKLYGGAWFRQAQGKGREGVAAIWIGTGTT |
| | | FYADSVKGRFTISRDNAKNTVYLQMDGLKP |
| | | EDTALYYCAADDRPGYRDPLAPVSYNHWGQ |
| | | GTQVTVSS |
| | | (SEQ ID NO: 158) |
| 159 | IL12Rβ1 V_{H}H | QVQLQESGGGSVQAGETLRLSCTVSGFTID |
| | -GGGS- | DSEMGWYRQAPGHECELVASGSSDDDTYYV |
| | IL12Rβ2 V_{H}H | DSVKGRFTISLDNAKNMVYLQMNSLKPEDT |
| | | AVYYCATGPTYPPKDGDCAHWGQGTQVTVS |
| | | SGGGSQVQLQESGGGSVQAGGSLRLSCAAS |
| | | GITYRGVWMGWFRQAPGKEREGVATIYTGS |
| | | GHTYYADSVKGRFTISQDNAKNTVYLQMNS |
| | | LKPEDTAMYYCAARTVGGTFYTLAADSFNT |
| | | WGQGTQVTVSS |
| | | (SEQ ID NO: 159) |
| 160 | IL12Rβ1 V_{H}H | QVQLQESGGGSVQAGETLRLSCTVSGFTID |
| | -GGGS- | DSEMGWYRQAPGHECELVASGSSDDDTYYV |
| | IL12Rβ2 V_{H}H | DSVKGRFTISLDNAKNMVYLQMNSLKPEDT |
| | | AVYYCATGPTYPPKDGDCAHWGQGTQVTVS |
| | | SGGGSQVQLQESGGGSVQDGGSLRLSCAAS |
| | | GDIYARNCMGWFRQAPGKEREKIAVADTGG |
| | | RSPYYADSVKGRFTISRDNAKNTVDLQMNS |
| | | LKPEDTAVYYCAAGPLVPVVNTAARCVYEY |
| | | WGQGTQVTVSS |
| | | (SEQ ID NO: 160) |
| 161 | IL12Rβ1 V_{H}H | QVQLQESGGGSVQAGGSLRLSCAASGYTYS |
| | -GGGS- | NRHMGWFRQAPGKEREGVAAIYTGGGSTYY |
| | IL12Rβ2VHH | ADSVKDRFTISQDNAKNTLYLQMNSLTPED |
| | | TAMYYCAADLTRWYSGGWRDPRGYKYWGQG |
| | | TQVTVSGGGSQVQLQESGGGSVQAGGSLRL |
| | | SCTASGYTYSSAFMAWFRQAPGKEREGVAA |
| | | IYTRDGGTVYADSVKGRFTISQDNAKNTLY |
| | | LQMNSLKAEDTAMYYCAAKIPQPGRASLLD |
| | | SQTYDYWGQGTQVTVSS |
| | | (SEQ ID NO: 161) |
| 162 | IL12Rβ1 V_{H}H | QVQLQESGGGSVQAGGSLRLSCAASGYTYS |
| | -GGGS- | NRHMGWFRQAPGKEREGVAAIYTGGGSTYY |
| | IL12Rβ2 V_{H}H | ADSVKDRFTISQDNAKNTLYLQMNSLTPED |
| | | TAMYYCAADLTRWYSGGWRDPRGYKYWGQG |
| | | TQVTVSGGGSQVQLQESGGGSVQAGGSLRL |
| | | SCAVSGYDYCGYDVRWYRQAPGKEREFVSG |
| | | IDSDGSTSYADSVKGRFTISQDNAENTSYL |
| | | HMFSLKPEDTAMYYCKTESPAGESAWCRNF |
| | | RGMDYWGKGTQVTVSS |
| | | (SEQ ID NO: 162) |
| 163 | IL12Rβ1 V_{H}H | QVQLQESGGGSVQAGGSLRLSCAASGYTYS |
| | -GGGS- | NRHMGWFRQAPGKEREGVAAIYTGGGSTYY |
| | IL12Rβ2 V_{H}H | ADSVKDRFTISQDNAKNTLYLQMNSLTPED |
| | | TAMYYCAADLTRWYSGGWRDPRGYKYWGQG |
| | | TQVTVSGGGSQVQLQESGGGSVQAGGSLRL |
| | | SCVASGYSYCGYDMMWYRQAPGKEREFVAL |
| | | ITSDYSIRYEDSVEGRFSISRDNAKNTGYL |
| | | LMSNLTPADTAIYYCKTSTAARESSWCRSR |
| | | YRVASWGQGTQVTVSS |
| | | (SEQ ID NO: 163) |
| 164 | IL12Rβ1 V_{H}H | QVQLQESGGGSVQAGGSLRLSCAASGYTYS |
| | -GGGS- | NRHMGWFRQAPGKEREGVAAIYTGGGSTYY |
| | IL12Rβ2 V_{H}H | ADSVKDRFTISQDNAKNTLYLQMNSLTPED |
| | | TAMYYCAADLTRWYSGGWRDPRGYKYWGQG |
| | | TQVTVSGGGSQVQLQESGGGSVQAGGSLRL |
| | | SCAASRYTYTNNFMAWFRQAPGKEREGVAA |
| | | IYTGDGYAYYFDSVKGRFTISQDNDKNMLY |
| | | LQMNSLKPEDTAMYYCAAMERRSGRRRMTE |
| | | NAEYKYWGQGTQVTVSS |
| | | (SEQ ID NO: 164) |
| 165 | IL12Rβ1 V_{H}H | QVQLQESGGGSVQAGGSLRLSCAASGYTYS |
| | -GGGS- | NRHMGWFRQAPGKEREGVAAIYTGGGSTYY |
| | IL12Rβ2 V_{H}H | ADSVKDRFTISQDNAKNTLYLQMNSLTPED |
| | | TAMYYCAADLTRWYSGGWRDPRGYKYWGQG |
| | | TQVTVSGGGSQVQLQESGGGSVQAGETLRL |
| | | SCTVSGFTIDDSEMGWYRQAPGHECELVAS |
| | | GSSDDDTYYVDSVKGRFTISLDNAKNMVYL |
| | | QMNSLKPEDTAVYYCATGPTYPPKDGDCAH |
| | | WGQGTQVTVSS |
| | | (SEQ ID NO: 165) |
| 166 | IL12Rβ1 V_{H}H | QVQLQESGGGSVQAGGSLRLSCAASGVTYGSYYMAAWFRQ |
| | -GGGS- | APGKEREGVASIYGGSDSTYYADSVLGRFTISQDNGKNTL |
| | IL12Rβ2 V_{H}H | YLQMNSLKPDDTAMYYCAAAPPGKWFLKRLEGHNYSYWGQ |
| | | GTQVTVSSGGGSQVQLQESGGGSVQAGGSLRLSCTASGYT |
| | | YSSAFMAWFRQAPGKEREGVAAIYTRDGGTVYADSVKGRF |
| | | TISQDNAKNTLYLQMNSLKAEDTAMYYCAAKIPQPGRASL |
| | | LDSQTYDYWGQGTQVTVSS |
| | | (SEQ ID NO: 166) |
| 167 | IL12Rβ1 V_{H}H | QVQLQESGGGSVQAGGSLRLSCAASGVTYGSYYMAAWFRQ |
| | -GGGS- | APGKEREGVASIYGGSDSTYYADSVLGRFTISQDNGKNTL |
| | IL12Rβ2 V_{H}H | YLQMNSLKPDDTAMYYCAAAPPGKWFLKRLEGHNYSYWGQ |
| | | GTQVTVSSGGGSQVQLQESGGGSVQAGGSLRLSCAVSGYD |
| | | YCGYDVRWYRQAPGKEREFVSGIDSDGSTSYADSVKGRFT |
| | | ISQDNAENTSYLHMFSLKPEDTAMYYCKTESPAGESAWCR |
| | | NFRGMDYWGKGTQVTVSS |
| | | (SEQ ID NO: 167) |
| 168 | IL12Rβ1 V_{H}H | QVQLQESGGGSVQAGGSLRLSCAASGVTYGSYYMAAWFRQ |
| | -GGGS- | APGKEREGVASIYGGSDSTYYADSVLGRFTISQDNGKNTL |
| | IL12Rβ2 V_{H}H | YLQMNSLKPDDTAMYYCAAAPPGKWFLKRLEGHNYSYWGQ |
| | | GTQVTVSSGGGSQVQLQESGGGSVQAGGSLRLSCVASGYS |
| | | YCGYDMMWYRQAPGKEREFVALITSDYSIRYEDSVEGRFS |
| | | ISRDNAKNTGYLLMSNLTPADTAIYYCKTSTAARESSWCR |
| | | SRYRVASWGQGTQVTVSS |
| | | (SEQ ID NO: 168) |
| 169 | IL12Rβ1 V_{H}H | QVQLQESGGGSVQAGGSLRLSCAASGVTYGSYYMAAWFRQ |
| | -GGGS- | APGKEREGVASIYGGSDSTYYADSVLGRFTISQDNGKNTL |
| | IL12Rβ2 V_{H}H | YLQMNSLKPDDTAMYYCAAAPPGKWFLKRLEGHNYSYWGQ |
| | | GTQVTVSSGGGSQVQLQESGGGSVQAGGSLRLSCAASRYT |
| | | YTNNFMAWFRQAPGKEREGVAAIYTGDGYAYYFDSVKGRF |
| | | TISQDNDKNMLYLQMNSLKPEDTAMYYCAAMERRSGRRRM |
| | | TENAEYKYWGQGTQVTVSS |
| | | (SEQ ID NO: 169) |
| 170 | IL12Rβ1 V_{H}H | QVQLQESGGGSVQAGGSLRLSCAASGVTYGSYYMAAWFRQ |
| | -GGGS- | APGKEREGVASIYGGSDSTYYADSVLGRFTISQDNGKNTL |
| | IL12Rβ2 V_{H}H | YLQMNSLKPDDTAMYYCAAAPPGKWFLKRLEGHNYSYWGQ |
| | | GTQVTVSSGGGSQVQLQESGGGSVQAGETLRLSCTVSGFT |
| | | IDDSEMGWYRQAPGHECELVASGSSDDDTYYVDSVKGRFT |
| | | ISLDNAKNMVYLQMNSLKPEDTAVYYCATGPTYPPKDGDC |
| | | AHWGQGTQVTVSS |
| | | (SEQ ID NO: 170) |
| 171 | IL12Rβ1 V_{H}H | QVQLQESGGGSVQVGGSLRLSCAASGFTYSSSCLGWFRQA |
| | -GGGS- | PGKEREGVATIYPAGGNIFYADSVKGRFTISQDNAKNTVY |
| | IL12Rβ2 V_{H}H | LQMDSLKPEDTAMYYCAARGGQTWGSGGNRCSLWLPAYNY |
| | | WGQGTQVTVSSGGGSQVQLQESGGGSVQAGGSLRLSCTAS |
| | | GYTYSSAFMAWFRQAPGKEREGVAAIYTRDGGTVYADSVK |
| | | GRFTISQDNAKNTLYLQMNSLKAEDTAMYYCAAKIPQPGR |
| | | ASLLDSQTYDYWGQGTQVTVSS |
| | | (SEQ ID NO: 171) |
| 172 | IL12Rβ1 V_{H}H | QVQLQESGGGSVQVGGSLRLSCAASGFTYSSSCLGWFRQA |
| | -GGGS- | PGKEREGVATIYPAGGNIFYADSVKGRFTISQDNAKNTVY |
| | IL12Rβ2 V_{H}H | LQMDSLKPEDTAMYYCAARGGQTWGSGGNRCSLWLPAYNY |
| | | WGQGTQVTVSSGGGSQVQLQESGGGSVQAGGSLRLSCAVS |
| | | GYDYCGYDVRWYRQAPGKEREFVSGIDSDGSTSYADSVKG |
| | | RFTISQDNAENTSYLHMFSLKPEDTAMYYCKTESPAGESA |
| | | WCRNFRGMDYWGKGTQVTVSS |
| | | (SEQ ID NO: 172) |
| 173 | IL12Rβ1 V_{H}H | QVQLQESGGGSVQVGGSLRLSCAASGFTYSSSCLGWFRQA |
| | -GGGS- | PGKEREGVATIYPAGGNIFYADSVKGRFTISQDNAKNTVY |
| | IL12Rβ2 V_{H}H | LQMDSLKPEDTAMYYCAARGGQTWGSGGNRCSLWLPAYNY |
| | | WGQGTQVTVSSGGGSQVQLQESGGGSVQAGGSLRLSCVAS |
| | | GYSYCGYDMMWYRQAPGKEREFVALITSDYSIRYEDSVEG |
| | | RFSISRDNAKNTGYLLMSNLTPADTAIYYCKTSTAARESS |
| | | WCRSRYRVASWGQGTQVTVSS |
| | | (SEQ ID NO: 173) |
| 174 | IL12Rβ1 V_{H}H | QVQLQESGGGSVQVGGSLRLSCAASGFTYSSSCLGWFRQA |
| | -GGGS- | PGKEREGVATIYPAGGNIFYADSVKGRFTISQDNAKNTVY |
| | IL12Rβ2 V_{H}H | LQMDSLKPEDTAMYYCAARGGQTWGSGGNRCSLWLPAYNY |
| | | WGQGTQVTVSSGGGSQVQLQESGGGSVQAGGSLRLSCAAS |
| | | RYTYTNNFMAWFRQAPGKEREGVAAIYTGDGYAYYFDSVK |
| | | GRFTISQDNDKNMLYLQMNSLKPEDTAMYYCAAMERRSGR |
| | | RRMTENAEYKYWGQGTQVTVSS |
| | | (SEQ ID NO: 174) |
| 175 | IL12Rβ1 V_{H}H | QVQLQESGGGSVQVGGSLRLSCAASGFTYSSSCLGWFRQA |
| | -GGGS- | PGKEREGVATIYPAGGNIFYADSVKGRFTISQDNAKNTVY |
| | IL12Rβ2 V_{H}H | LQMDSLKPEDTAMYYCAARGGQTWGSGGNRCSLWLPAYNY |
| | | WGQGTQVTVSSGGGSQVQLQESGGGSVQAGETLRLSCTVS |
| | | GFTIDDSEMGWYRQAPGHECELVASGSSDDDTYYVDSVKG |
| | | RFTISLDNAKNMVYLQMNSLKPEDTAVYYCATGPTYPPKD |
| | | GDCAHWGQGTQVTVSS |
| | | (SEQ ID NO: 175) |
| 176 | IL12Rβ1 V_{H}H | QVQLQESGGGSVQVGGSLRLSCAVSGKLYGGAWFRQAQGK |
| | -GGGS- | GREGVAAIWIGTGTTFYADSVKGRFTISRDNAKNTVYLQM |
| | IL12Rβ2 V_{H}H | DGLKPEDTALYYCAADDRPGYRDPLAPVSYNHWGQGTQVT |
| | | VSSGGGSQVQLQESGGGSVQAGGSLRLSCTASGYTYSSAF |
| | | MAWFRQAPGKEREGVAAIYTRDGGTVYADSVKGRFTISQD |
| | | NAKNTLYLQMNSLKAEDTAMYYCAAKIPQPGRASLLDSQT |
| | | YDYWGQGTQVTVSS |
| | | (SEQ ID NO: 176) |
| 177 | IL12Rβ1 V_{H}H | QVQLQESGGGSVQVGGSLRLSCAVSGKLYGGAWFRQAQGK |
| | -GGGS- | GREGVAAIWIGTGTTFYADSVKGRFTISRDNAKNTVYLQM |
| | IL12Rβ2 V_{H}H | DGLKPEDTALYYCAADDRPGYRDPLAPVSYNHWGQGTQVT |
| | | VSSGGGSQVQLQESGGGSVQAGGSLRLSCAVSGYDYCGYD |
| | | VRWYRQAPGKEREFVSGIDSDGSTSYADSVKGRFTISQDN |
| | | AENTSYLHMFSLKPEDTAMYYCKTESPAGESAWCRNFRGM |
| | | DYWGKGTQVTVSS |
| | | (SEQ ID NO: 177) |
| 178 | IL12Rβ1 V_{H}H | QVQLQESGGGSVQVGGSLRLSCAVSGKLYGGAWFRQAQGK |
| | -GGGS- | GREGVAAIWIGTGTTFYADSVKGRFTISRDNAKNTVYLQM |
| | IL12Rβ2VHH | DGLKPEDTALYYCAADDRPGYRDPLAPVSYNHWGQGTQVT |
| | | VSSGGGSQVQLQESGGGSVQAGGSLRLSCVASGYSYCGYD |
| | | MMWYRQAPGKEREFVALITSDYSIRYEDSVEGRFSISRDN |
| | | AKNTGYLLMSNLTPADTAIYYCKTSTAARESSWCRSRYRV |
| | | ASWGQGTQVTVSS |
| | | (SEQ ID NO: 178) |
| 179 | IL12Rβ1 V_{H}H | QVQLQESGGGSVQVGGSLRLSCAVSGKLYGGAWFRQAQGK |
| | -GGGS- | GREGVAAIWIGTGTTFYADSVKGRFTISRDNAKNTVYLQM |
| | IL12Rβ2 V_{H}H | DGLKPEDTALYYCAADDRPGYRDPLAPVSYNHWGQGTQVT |
| | | VSSGGGSQVQLQESGGGSVQAGGSLRLSCAASRYTYTNNF |
| | | MAWFRQAPGKEREGVAAIYTGDGYAYYFDSVKGRFTISQD |
| | | NDKNMLYLQMNSLKPEDTAMYYCAAMERRSGRRRMTENAE |
| | | YKYWGQGTQVTVSS |
| | | (SEQ ID NO: 179) |
| 180 | IL12Rβ1 V_{H}H | QVQLQESGGGSVQVGGSLRLSCAVSGKLYGGAWFRQAQGK |
| | -GGGS- | GREGVAAIWIGTGTTFYADSVKGRFTISRDNAKNTVYLQM |
| | IL12Rβ2 V_{H}H | DGLKPEDTALYYCAADDRPGYRDPLAPVSYNHWGQGTQVT |
| | | VSSGGGSQVQLQESGGGSVQAGETLRLSCTVSGFTIDDSE |
| | | MGWYRQAPGHECELVASGSSDDDTYYVDSVKGRFTISLDN |
| | | AKNMVYLQMNSLKPEDTAVYYCATGPTYPPKDGDCAHWGQ |
| | | GTQVTVSS |
| | | (SEQ ID NO: 180) |
| 181 | IL12Rβ1 V_{H}H | QVQLQESGGGSVQAGGSLRLSCAASGITYRGVWMGWFRQA |
| | -GGGS- | PGKEREGVATIYTGSGHTYYADSVKGRFTISQDNAKNTVY |
| | IL12Rβ2 V_{H}H | LQMNSLKPEDTAMYYCAARTVGGTFYTLAADSFNTWGQGT |
| | | QVTVSSGGGSQVQLQESGGGSVQAGGSLRLSCTASGYTYS |
| | | SAFMAWFRQAPGKEREGVAAIYTRDGGTVYADSVKGRFTI |
| | | SQDNAKNTLYLQMNSLKAEDTAMYYCAAKIPQPGRASLLD |
| | | SQTYDYWGQGTQVTVSS |
| | | (SEQ ID NO: 181) |
| 182 | IL12Rβ1 V_{H}H | QVQLQESGGGSVQAGGSLRLSCAASGITYRGVWMGWFRQA |
| | -GGGS- | PGKEREGVATIYTGSGHTYYADSVKGRFTISQDNAKNTVY |
| | IL12Rβ2 V_{H}H | LQMNSLKPEDTAMYYCAARTVGGTFYTLAADSFNTWGQGT |
| | | QVTVSSGGGSQVQLQESGGGSVQAGGSLRLSCAVSGYDYC |
| | | GYDVRWYRQAPGKEREFVSGIDSDGSTSYADSVKGRFTIS |
| | | QDNAENTSYLHMFSLKPEDTAMYYCKTESPAGESAWCRNF |
| | | RGMDYWGKGTQVTVSS |
| | | (SEQ ID NO: 182) |
| 183 | IL12Rβ1 V_{H}H | QVQLQESGGGSVQAGGSLRLSCAASGITYRGVWMGWFRQA |
| | -GGGS- | PGKEREGVATIYTGSGHTYYADSVKGRFTISQDNAKNTVY |
| | IL12Rβ2VHH | LQMNSLKPEDTAMYYCAARTVGGTFYTLAADSFNTWGQGT |
| | | QVTVSSGGGSQVQLQESGGGSVQAGGSLRLSCVASGYSYC |
| | | GYDMMWYRQAPGKEREFVALITSDYSIRYEDSVEGRFSIS |
| | | RDNAKNTGYLLMSNLTPADTAIYYCKTSTAARESSWCRSR |
| | | YRVASWGQGTQVTVSS |
| | | (SEQ ID NO: 183) |
| 184 | IL12Rβ1 V_{H}H | QVQLQESGGGSVQAGGSLRLSCAASGITYRGVWMGWFRQA |
| | -GGGS- | PGKEREGVATIYTGSGHTYYADSVKGRFTISQDNAKNTVY |
| | IL12Rβ2 V_{H}H | LQMNSLKPEDTAMYYCAARTVGGTFYTLAADSFNTWGQGT |
| | | QVTVSSGGGSQVQLQESGGGSVQAGGSLRLSCAASRYTYT |
| | | NNFMAWFRQAPGKEREGVAAIYTGDGYAYYFDSVKGRFTI |
| | | SQDNDKNMLYLQMNSLKPEDTAMYYCAAMERRSGRRRMTE |
| | | NAEYKYWGQGTQVTVSS |
| | | (SEQ ID NO: 184) |
| 185 | IL12Rβ1 V_{H}H | QVQLQESGGGSVQAGGSLRLSCAASGITYRGVWMGWFRQA |
| | -GGGS- | PGKEREGVATIYTGSGHTYYADSVKGRFTISQDNAKNTVY |
| | IL12Rβ2 V_{H}H | LQMNSLKPEDTAMYYCAARTVGGTFYTLAADSFNTWGQGT |
| | | QVTVSSGGGSQVQLQESGGGSVQAGETLRLSCTVSGFTID |
| | | DSEMGWYRQAPGHECELVASGSSDDDTYYVDSVKGRFTIS |
| | | LDNAKNMVYLQMNSLKPEDTAVYYCATGPTYPPKDGDCAH |
| | | WGQGTQVTVSS |
| | | (SEQ ID NO: 185) |
| 186 | IL12Rβ1 V_{H}H | QVQLQESGGGSVQDGGSLRLSCAASGDIYARNCMGWFRQA |
| | -GGGS- | PGKEREKIAVADTGGRSPYYADSVKGRFTISRDNAKNTVD |
| | IL12Rβ2 V_{H}H | LQMNSLKPEDTAVYYCAAGPLVPVVNTAARCVYEYWGQGT |
| | | QVTVSSGGGSQVQLQESGGGSVQAGGSLRLSCTASGYTYS |
| | | SAFMAWFRQAPGKEREGVAAIYTRDGGTVYADSVKGRFTI |
| | | SQDNAKNTLYLQMNSLKAEDTAMYYCAAKIPQPGRASLLD |
| | | SQTYDYWGQGTQVTVSS |
| | | (SEQ ID NO: 186) |
| 187 | IL12Rβ1 V_{H}H | QVQLQESGGGSVQDGGSLRLSCAASGDIYARNCMGWFRQA |
| | -GGGS- | PGKEREKIAVADTGGRSPYYADSVKGRFTISRDNAKNTVD |
| | IL12Rβ2 V_{H}H | LQMNSLKPEDTAVYYCAAGPLVPVVNTAARCVYEYWGQGT |
| | | QVTVSSGGGSQVQLQESGGGSVQAGGSLRLSCAVSGYDYC |
| | | GYDVRWYRQAPGKEREFVSGIDSDGSTSYADSVKGRFTIS |
| | | QDNAENTSYLHMFSLKPEDTAMYYCKTESPAGESAWCRNF |
| | | RGMDYWGKGTQVTVSS |
| | | (SEQ ID NO: 187) |
| 188 | IL12Rβ1 V_{H}H | QVQLQESGGGSVQDGGSLRLSCAASGDIYARNCMGWFRQA |
| | -GGGS- | PGKEREKIAVADTGGRSPYYADSVKGRFTISRDNAKNTVD |
| | IL12Rβ2 V_{H}H | LQMNSLKPEDTAVYYCAAGPLVPVVNTAARCVYEYWGQGT |
| | | QVTVSSGGGSQVQLQESGGGSVQAGGSLRLSCVASGYSYC |
| | | GYDMMWYRQAPGKEREFVALITSDYSIRYEDSVEGRFSIS |
| | | RDNAKNTGYLLMSNLTPADTAIYYCKTSTAARESSWCRSR |
| | | YRVASWGQGTQVTVSS |
| | | (SEQ ID NO: 188) |
| 189 | IL12Rβ1 V_{H}H | QVQLQESGGGSVQDGGSLRLSCAASGDIYARNCMGWFRQA |
| | -GGGS- | PGKEREKIAVADTGGRSPYYADSVKGRFTISRDNAKNTVD |
| | IL12Rβ2 V_{H}H | LQMNSLKPEDTAVYYCAAGPLVPVVNTAARCVYEYWGQGT |
| | | QVTVSSGGGSQVQLQESGGGSVQAGGSLRLSCAASRYTYT |
| | | NNFMAWFRQAPGKEREGVAAIYTGDGYAYYFDSVKGRFTI |
| | | SQDNDKNMLYLQMNSLKPEDTAMYYCAAMERRSGRRRMTE |
| | | NAEYKYWGQGTQVTVSS |
| | | (SEQ ID NO: 189) |
| 190 | IL12Rβ1 V_{H}H | QVQLQESGGGSVQDGGSLRLSCAASGDIYARNCMGWFRQA |
| | -GGGS- | PGKEREKIAVADTGGRSPYYADSVKGRFTISRDNAKNTVD |
| | IL12Rβ2 V_{H}H | LQMNSLKPEDTAVYYCAAGPLVPVVNTAARCVYEYWGQGT |
| | | QVTVSSGGGSQVQLQESGGGSVQAGETLRLSCTVSGFTID |
| | | DSEMGWYRQAPGHECELVASGSSDDDTYYVDSVKGRFTIS |
| | | LDNAKNMVYLQMNSLKPEDTAVYYCATGPTYPPKDGDCAH |
| | | WGQGTQVTVSS |
| | | (SEQ ID NO: 190) |
| 191 | linker | GSGSGSGS |
| 192 | IL10Rα | QVQLQESGGGSVQAGGSLRLSCAASRYLYSIDYMAWFRQS |
| | VHH- | PGKEREPVAVIYTASGATFYPDSVKGRFTISQDNAKMTVY |
| | GGGS- | LQMNSLKSEDTAMYYCAAVRKTDSYLFDAQSFTYWGQGTQ |
| | IL10RβVHH- | VTVSSGGGSQVQLQESGGGSVQAGGSLRLSCAASGYTYSS |
| | ASH6 | GCMGWFRQAPGKEREAVAAINSDGSTSYADSVKGRFTISK |
| | | DNAKNTLYLQMNSLKPEDTAMYYCAAEPYCSGGYPRWSVA |
| | | EFGYWGQGTQVTVSSASHHHHHH |
| 193 | IL10Rα | QVQLQESGGGSVQAGGSLRLSCAASRYLYSIDYMAWFRQS |
| | VHH- | PGKEREPVAVIYTASGATFYPDSVKGRFTISQDNAKMTVY |
| | GGGS- | LQMNSLKSEDTAMYYCAAVRKTDSYLFDAQSFTYWGQGTQ |
| | IL10RβVHH- | VTVSSGGGSQVQLQESGGGSVQAGGSLRLSCAASGYTYSS |
| | ASH6 | YCMGWFRQAPGKEREGVAHIDSDGSTSYADSVKGRFTISK |
| | | DNAKNTLYLQMNSLKPEDTAMYYCAADPIPGPGYCDGGPN |
| | | KYWGQGTQVTVSSASHHHHHH |
| 194 | IL10Rα | QVQLQESGGGSVQAGGSLRLSCAASRYLYSIDYMAWFRQS |
| | VHH- | PGKEREPVAVIYTASGATFYPDSVKGRFTISQDNAKMTVY |
| | GGGS- | LQMNSLKSEDTAMYYCAAVRKTDSYLFDAQSFTYWGQGTQ |
| | IL10RβVHH- | VTVSSGGGSQVQLQESGGGSVQAGGSLRLSCAASRYTYNS |
| | ASH6 | YCMGWFRQAPGKEREGVATIDSDGMTRYADSVKGRFTISK |
| | | DNAKNTLYLQMNSLKPEDTAMYYCAADADCTIAAMTTNPL |
| | | GQGTQVTVSSASHHHHHH |
| 195 | IL10Rα | QVQLQESGGGSVQAGGSLRLSCAASRYLYSIDYMAWFRQS |
| | VHH- | PGKEREPVAVIYTASGATFYPDSVKGRFTISQDNAKMTVY |
| | GGGS- | LQMNSLKSEDTAMYYCAAVRKTDSYLFDAQSFTYWGQGTQ |
| | IL10RβVHH- | VTVSSGGGSQVQLQESGGGSVQAGGSLRLSCTVSRYTASV |
| | ASH6 | NYMGWFRQAPGKEREGVATIFTGAGTTYYANSVKGRFTIS |
| | | RDNAKNTAYLQMNSLKPEDTAIYYCAVDFRGGLLYRPAYE |
| | | YTYRGQGTQVTVSSASHHHHHH |
| 196 | IL10Rα | QVQLQESGGGSVQAGGSLRLSCAASRYLYSIDYMAWFRQS |
| | VHH- | PGKEREPVAVIYTASGATFYPDSVKGRFTISQDNAKMTVY |
| | GGGS- | LQMNSLKSEDTAMYYCAAVRKTDSYLFDAQSFTYWGQGTQ |
| | IL10RβVHH- | VTVSSGGGSQVQLQESGGGSVEAGGSLRLSCAASGYTHSS |
| | ASH6 | YCMGWFRQAPGKEREGVAAIDVDGSTTYADSVKGRFTISK |
| | | DNAKNTLYLQMNSLKPEDTGMYYCAAEFADCSSNYFLPPG |
| | | AVRYWGQGTQVTVSSASHHHHHH |
| 197 | IL10Rα | QVQLQESGGGSVQAGGSLRLSCAASRYLYSIDYMAWFRQS |
| | VHH- | PGKEREPVAVIYTASGATFYPDSVKGRFTISQDNAKMTVY |
| | GGGS- | LQMNSLKSEDTAMYYCAAVRKTDSYLFDAQSFTYWGQGTQ |
| | IL10RβVHH- | VTVSSGGGSQVQLQESGGGSVQAGGSLRLSCAASGYSYSS |
| | ASH6 | YCMGWFRQAPGKEREGVATIDSDGMTRYADSVKGRFTISK |
| | | DNAKNTLYLQMNSLKPEDTAMYYCAAPLYDCDSGAVGRNP |
| | | PYWGQGTQVTVSSASHHHHHH |
| 198 | IL10Rα | QVQLQESGGGSVQAGGSLRLSCAASRYLYSIDYMAWFRQS |
| | VHH- | PGKEREPVAVIYTASGATFYPDSVKGRFTISQDNAKMTVY |
| | GGGS- | LQMNSLKSEDTAMYYCAAVRKTDSYLFDAQSFTYWGQGTQ |
| | IL10RβVHH- | VTVSSGGGSQVQLQESGGGSVQTGGSLRLSCAASGYTYLR |
| | ASH6 | GCMGWFRQAPGKEREGVAVMDVVGDRRSYIDSVKGRFTIS |
| | | RDNAANSVYLQMDNLKPEDTAMYYCTAGPNCVGWRSGLDY |
| | | WGQGTQVTVSSASHHHHHH |
| 199 | IL10Rα | QVQLQESGGGSVQAGGSLRLSCAASRFTYSSYCMGWFRQA |
| | VHH- | PGKEREGVASIDSDGSTSYTDSVKGRFTISKDNAKNTLYL |
| | GGGS- | QMNSLKPEDTAMYYCALDLMSTVVPGFCGFLLSAGMDYWG |
| | IL10RβVHH- | KGTQVTVSSGGGSQVQLQESGGGSVQAGGSLRLSCAASGY |
| | ASH6 | TYSSGCMGWFRQAPGKEREAVAAINSDGSTSYADSVKGRF |
| | | TISKDNAKNTLYLQMNSLKPEDTAMYYCAAEPYCSGGYPR |
| | | WSVAEFGYWGQGTQVTVSSASHHHHHH |
| 200 | IL10Rα | QVQLQESGGGSVQAGGSLRLSCAASRFTYSSYCMGWFRQA |
| | VHH- | PGKEREGVASIDSDGSTSYTDSVKGRFTISKDNAKNTLYL |
| | GGGS- | QMNSLKPEDTAMYYCALDLMSTVVPGFCGFLLSAGMDYWG |
| | IL10RβVHH- | KGTQVTVSSGGGSQVQLQESGGGSVQAGGSLRLSCAASGY |
| | ASH6 | TYSSYCMGWFRQAPGKEREGVAHIDSDGSTSYADSVKGRF |
| | | TISKDNAKNTLYLQMNSLKPEDTAMYYCAADPIPGPGYCD |
| | | GGPNKYWGQGTQVTVSSASHHHHHH |
| 201 | IL10Rα | QVQLQESGGGSVQAGGSLRLSCAASRFTYSSYCMGWFRQA |
| | VHH- | PGKEREGVASIDSDGSTSYTDSVKGRFTISKDNAKNTLYL |
| | GGGS- | QMNSLKPEDTAMYYCALDLMSTVVPGFCGFLLSAGMDYWG |
| | IL10Rα | KGTQVTVSSGGGSQVQLQESGGGSVQAGGSLRLSCAASRY |
| | VHH- | TYNSYCMGWFRQAPGKEREGVATIDSDGMTRYADSVKGRF |
| | ASH6 | TISKDNAKNTLYLQMNSLKPEDTAMYYCAADADCTIAAMT |
| | | TNPLGQGTQVTVSSASHHHHHH |
| 202 | IL10Rα | QVQLQESGGGSVQAGGSLRLSCAASRFTYSSYCMGWFRQA |
| | VHH- | PGKEREGVASIDSDGSTSYTDSVKGRFTISKDNAKNTLYL |
| | GGGS- | QMNSLKPEDTAMYYCALDLMSTVVPGFCGFLLSAGMDYWG |
| | IL10RβVHH- | KGTQVTVSSGGGSQVQLQESGGGSVQAGGSLRLSCTVSRY |
| | ASH6 | TASVNYMGWFRQAPGKEREGVATIFTGAGTTYYANSVKGR |
| | | FTISRDNAKNTAYLQMNSLKPEDTAIYYCAVDFRGGLLYR |
| | | PAYEYTYRGQGTQVTVSSASHHHHHH |
| 203 | IL10Rα V_{H}H- | QVQLQESGGGSVQAGGSLRLSCAASRFTYSSYCMGWFRQA |
| | GGGS- | PGKEREGVASIDSDGSTSYTDSVKGRFTISKDNAKNTLYL |
| | IL10RβVHH- | QMNSLKPEDTAMYYCALDLMSTVVPGFCGFLLSAGMDYWG |
| | ASH6 | KGTQVTVSSGGGSQVQLQESGGGSVEAGGSLRLSCAASGY |
| | | THSSYCMGWFRQAPGKEREGVAAIDVDGSTTYADSVKGRF |
| | | TISKDNAKNTLYLQMNSLKPEDTGMYYCAAEFADCSSNYF |
| | | LPPGAVRYWGQGTQVTVSSASHHHHHH |
| 204 | IL10Rα V_{H}H- | QVQLQESGGGSVQAGGSLRLSCAASRFTYSSYCMGWFRQA |
| | GGGS- | PGKEREGVASIDSDGSTSYTDSVKGRFTISKDNAKNTLYL |
| | IL10RβVHH- | QMNSLKPEDTAMYYCALDLMSTVVPGFCGFLLSAGMDYWG |
| | ASH6 | KGTQVTVSSGGGSQVQLQESGGGSVQAGGSLRLSCAASGY |
| | | SYSSYCMGWFRQAPGKEREGVATIDSDGMTRYADSVKGRF |
| | | TISKDNAKNTLYLQMNSLKPEDTAMYYCAAPLYDCDSGAV |
| | | GRNPPYWGQGTQVTVSSASHHHHHH |
| 205 | IL10Rα V_{H}H- | QVQLQESGGGSVQAGGSLRLSCAASRFTYSSYCMGWFRQA |
| | GGGS- | PGKEREGVASIDSDGSTSYTDSVKGRFTISKDNAKNTLYL |
| | IL10RβVHH- | QMNSLKPEDTAMYYCALDLMSTVVPGFCGFLLSAGMDYWG |
| | ASH6 | KGTQVTVSSGGGSQVQLQESGGGSVQTGGSLRLSCAASGY |
| | | TYLRGCMGWFRQAPGKEREGVAVMDVVGDRRSYIDSVKGR |
| | | FTISRDNAANSVYLQMDNLKPEDTAMYYCTAGPNCVGWRS |
| | | GLDYWGQGTQVTVSSASHHHHHH |
| 206 | IL10Rα V_{H}H- | QVQLQESGGGSVQAGGSLRLSCAASGYTYSMYCMGWFRQA |
| | GGGS- | PGKEREGVAQINSDGSTSYADSVKGRFTISKDNAKNTLYL |
| | IL10RβVHH- | QMNSLKPEDTAMYYCAADSRVYGGSWYERLCGPYTYEYNY |
| | ASH6 | WGQGTQVTVSSGGGSQVQLQESGGGSVQAGGSLRLSCAAS |
| | | GYTYSSGCMGWFRQAPGKEREAVAAINSDGSTSYADSVKG |
| | | RFTISKDNAKNTLYLQMNSLKPEDTAMYYCAAEPYCSGGY |
| | | PRWSVAEFGYWGQGTQVTVSSASHHHHHH |
| 207 | IL10Rα V_{H}H- | QVQLQESGGGSVQAGGSLRLSCAASGYTYSMYCMGWFRQA |
| | GGGS- | PGKEREGVAQINSDGSTSYADSVKGRFTISKDNAKNTLYL |
| | IL10RβVHH- | QMNSLKPEDTAMYYCAADSRVYGGSWYERLCGPYTYEYNY |
| | ASH6 | WGQGTQVTVSSGGGSQVQLQESGGGSVQAGGSLRLSCAAS |
| | | GYTYSSYCMGWFRQAPGKEREGVAHIDSDGSTSYADSVKG |
| | | RFTISKDNAKNTLYLQMNSLKPEDTAMYYCAADPIPGPGY |
| | | CDGGPNKYWGQGTQVTVSSASHHHHHH |
| 208 | IL10Rα V_{H}H- | QVQLQESGGGSVQAGGSLRLSCAASGYTYSMYCMGWFRQA |
| | GGGS- | PGKEREGVAQINSDGSTSYADSVKGRFTISKDNAKNTLYL |
| | IL10RβVHH- | QMNSLKPEDTAMYYCAADSRVYGGSWYERLCGPYTYEYNY |
| | ASH6 | WGQGTQVTVSSGGGSQVQLQESGGGSVQAGGSLRLSCAAS |
| | | RYTYNSYCMGWFRQAPGKEREGVATIDSDGMTRYADSVKG |
| | | RFTISKDNAKNTLYLQMNSLKPEDTAMYYCAADADCTIAA |
| | | MTTNPLGQGTQVTVSSASHHHHHH |
| 209 | IL10Rα V_{H}H- | QVQLQESGGGSVQAGGSLRLSCAASGYTYSMYCMGWFRQA |
| | GGGS- | PGKEREGVAQINSDGSTSYADSVKGRFTISKDNAKNTLYL |
| | IL10RβVHH- | QMNSLKPEDTAMYYCAADSRVYGGSWYERLCGPYTYEYNY |
| | ASH6 | WGQGTQVTVSSGGGSQVQLQESGGGSVQAGGSLRLSCTVS |
| | | RYTASVNYMGWFRQAPGKEREGVATIFTGAGTTYYANSVK |
| | | GRFTISRDNAKNTAYLQMNSLKPEDTAIYYCAVDFRGGLL |
| | | YRPAYEYTYRGQGTQVTVSSASHHHHHH |
| 210 | IL10Rα V_{H}H- | QVQLQESGGGSVQAGGSLRLSCAASGYTYSMYCMGWFRQA |
| | GGGS- | PGKEREGVAQINSDGSTSYADSVKGRFTISKDNAKNTLYL |
| | IL10RβVHH- | QMNSLKPEDTAMYYCAADSRVYGGSWYERLCGPYTYEYNY |
| | ASH6 | WGQGTQVTVSSGGGSQVQLQESGGGSVEAGGSLRLSCAAS |
| | | GYTHSSYCMGWFRQAPGKEREGVAAIDVDGSTTYADSVKG |
| | | RFTISKDNAKNTLYLQMNSLKPEDTGMYYCAAEFADCSSN |
| | | YFLPPGAVRYWGQGTQVTVSSASHHHHHH |
| 211 | IL10Rα V_{H}H- | QVQLQESGGGSVQAGGSLRLSCAASGYTYSMYCMGWFRQA |
| | GGGS- | PGKEREGVAQINSDGSTSYADSVKGRFTISKDNAKNTLYL |
| | IL10RβVHH- | QMNSLKPEDTAMYYCAADSRVYGGSWYERLCGPYTYEYNY |
| | ASH6 | WGQGTQVTVSSGGGSQVQLQESGGGSVQAGGSLRLSCAAS |
| | | GYSYSSYCMGWFRQAPGKEREGVATIDSDGMTRYADSVKG |
| | | RFTISKDNAKNTLYLQMNSLKPEDTAMYYCAAPLYDCDSG |
| | | AVGRNPPYWGQGTQVTVSSASHHHHHH |
| 212 | IL10Rα V_{H}H- | QVQLQESGGGSVQAGGSLRLSCAASGYTYSMYCMGWFRQA |
| | GGGS- | PGKEREGVAQINSDGSTSYADSVKGRFTISKDNAKNTLYL |
| | IL10RβVHH- | QMNSLKPEDTAMYYCAADSRVYGGSWYERLCGPYTYEYNY |
| | ASH6 | WGQGTQVTVSSGGGSQVQLQESGGGSVQTGGSLRLSCAAS |
| | | GYTYLRGCMGWFRQAPGKEREGVAVMDVVGDRRSYIDSVK |
| | | GRFTISRDNAANSVYLQMDNLKPEDTAMYYCTAGPNCVGW |
| | | RSGLDYWGQGTQVTVSSASHHHHHH |
| 213 | IL10Rα V_{H}H- | QVQLQESGGGSVQAGGSLRLSCAVSGYAYSTYCMGWFRQA |
| | GGGS- | PGKEREGVAAIDSGGSTSYADSVKGRFTISKDNAKNTLYL |
| | IL10RβVHH- | RMNSLKPEDTAMYYCAAVPPPPDGGSCLFLGPEIKVSKAD |
| | ASH6 | FRYWGQGTQVTVSSGGGSQVQLQESGGGSVQAGGSLRLSC |
| | | AASGYTYSSGCMGWFRQAPGKEREAVAAINSDGSTSYADS |
| | | VKGRFTISKDNAKNTLYLQMNSLKPEDTAMYYCAAEPYCS |
| | | GGYPRWSVAEFGYWGQGTQVTVSSASHHHHHH |
| 214 | IL10Rα V_{H}H- | QVQLQESGGGSVQAGGSLRLSCAVSGYAYSTYCMGWFRQA |
| | GGGS- | PGKEREGVAAIDSGGSTSYADSVKGRFTISKDNAKNTLYL |
| | IL10RβVHH- | RMNSLKPEDTAMYYCAAVPPPPDGGSCLFLGPEIKVSKAD |
| | ASH6 | FRYWGQGTQVTVSSGGGSQVQLQESGGGSVQAGGSLRLSC |
| | | AASGYTYSSYCMGWFRQAPGKEREGVAHIDSDGSTSYADS |
| | | VKGRFTISKDNAKNTLYLQMNSLKPEDTAMYYCAADPIPG |
| | | PGYCDGGPNKYWGQGTQVTVSSASHHHHHH |
| 215 | IL10Rα V_{H}H- | QVQLQESGGGSVQAGGSLRLSCAVSGYAYSTYCMGWFRQA |
| | GGGS- | PGKEREGVAAIDSGGSTSYADSVKGRFTISKDNAKNTLYL |
| | IL10RβVHH- | RMNSLKPEDTAMYYCAAVPPPPDGGSCLFLGPEIKVSKAD |
| | ASH6 | FRYWGQGTQVTVSSGGGSQVQLQESGGGSVQAGGSLRLSC |
| | | AASRYTYNSYCMGWFRQAPGKEREGVATIDSDGMTRYADS |
| | | VKGRFTISKDNAKNTLYLQMNSLKPEDTAMYYCAADADCT |
| | | IAAMTTNPLGQGTQVTVSSASHHHHHH |
| 216 | IL10Rα V_{H}H- | QVQLQESGGGSVQAGGSLRLSCAVSGYAYSTYCMGWFRQA |
| | GGGS- | PGKEREGVAAIDSGGSTSYADSVKGRFTISKDNAKNTLYL |
| | IL10RβVHH- | RMNSLKPEDTAMYYCAAVPPPPDGGSCLFLGPEIKVSKAD |
| | ASH6 | FRYWGQGTQVTVSSGGGSQVQLQESGGGSVQAGGSLRLSC |
| | | TVSRYTASVNYMGWFRQAPGKEREGVATIFTGAGTTYYAN |
| | | SVKGRFTISRDNAKNTAYLQMNSLKPEDTAIYYCAVDFRG |
| | | GLLYRPAYEYTYRGQGTQVTVSSASHHHHHH |
| 217 | IL10Rα V_{H}H- | QVQLQESGGGSVQAGGSLRLSCAVSGYAYSTYCMGWFRQA |
| | GGGS- | PGKEREGVAAIDSGGSTSYADSVKGRFTISKDNAKNTLYL |
| | IL10RβVHH- | RMNSLKPEDTAMYYCAAVPPPPDGGSCLFLGPEIKVSKAD |
| | ASH6 | FRYWGQGTQVTVSSGGGSQVQLQESGGGSVEAGGSLRLSC |
| | | AASGYTHSSYCMGWFRQAPGKEREGVAAIDVDGSTTYADS |
| | | VKGRFTISKDNAKNTLYLQMNSLKPEDTGMYYCAAEFADC |
| | | SSNYFLPPGAVRYWGQGTQVTVSSASHHHHHH |
| 218 | IL10Rα V_{H}H- | QVQLQESGGGSVQAGGSLRLSCAVSGYAYSTYCMGWFRQA |
| | GGGS- | PGKEREGVAAIDSGGSTSYADSVKGRFTISKDNAKNTLYL |
| | IL10RβVHH- | RMNSLKPEDTAMYYCAAVPPPPDGGSCLFLGPEIKVSKAD |
| | ASH6 | FRYWGQGTQVTVSSGGGSQVQLQESGGGSVQAGGSLRLSC |
| | | AASGYSYSSYCMGWFRQAPGKEREGVATIDSDGMTRYADS |
| | | VKGRFTISKDNAKNTLYLQMNSLKPEDTAMYYCAAPLYDC |
| | | DSGAVGRNPPYWGQGTQVTVSSASHHHHHH |
| 219 | IL10Rα V_{H}H- | QVQLQESGGGSVQAGGSLRLSCAVSGYAYSTYCMGWFRQA |
| | GGGS- | PGKEREGVAAIDSGGSTSYADSVKGRFTISKDNAKNTLYL |
| | IL10RβVHH- | RMNSLKPEDTAMYYCAAVPPPPDGGSCLFLGPEIKVSKAD |
| | ASH6 | FRYWGQGTQVTVSSGGGSQVQLQESGGGSVQTGGSLRLSC |
| | | AASGYTYLRGCMGWFRQAPGKEREGVAVMDVVGDRRSYID |
| | | SVKGRFTISRDNAANSVYLQMDNLKPEDTAMYYCTAGPNC |
| | | VGWRSGLDYWGQGTQVTVSSASHHHHHH |
| 220 | IL10Rα V_{H}H- | QVQLQESGGGSVQAGGSLRLSCTVSGYTYSSNCMGWFRQA |
| | GGGS- | PGKEREGVATIYTGGGNTYYADSVKGRFTISQDNAKNTVY |
| | IL10RβVHH- | LQMNNLKPEDTAMYYCAAEPLSRVYGGSCPTPTFDYWGQG |
| | ASH6 | TQVTVSSGGGSQVQLQESGGGSVQAGGSLRLSCAASGYTY |
| | | SSGCMGWFRQAPGKEREAVAAINSDGSTSYADSVKGRFTI |
| | | SKDNAKNTLYLQMNSLKPEDTAMYYCAAEPYCSGGYPRWS |
| | | VAEFGYWGQGTQVTVSSASHHHHHH |
| 221 | IL10Rα V_{H}H- | QVQLQESGGGSVQAGGSLRLSCTVSGYTYSSNCMGWFRQA |
| | GGGS- | PGKEREGVATIYTGGGNTYYADSVKGRFTISQDNAKNTVY |
| | IL10RβVHH- | LQMNNLKPEDTAMYYCAAEPLSRVYGGSCPTPTFDYWGQG |
| | ASH6 | TQVTVSSGGGSQVQLQESGGGSVQAGGSLRLSCAASGYTY |
| | | SSYCMGWFRQAPGKEREGVAHIDSDGSTSYADSVKGRFTI |
| | | SKDNAKNTLYLQMNSLKPEDTAMYYCAADPIPGPGYCDGG |
| | | PNKYWGQGTQVTVSSASHHHHHH |
| 222 | IL10Rα V_{H}H- | QVQLQESGGGSVQAGGSLRLSCTVSGYTYSSNCMGWFRQA |
| | GGGS- | PGKEREGVATIYTGGGNTYYADSVKGRFTISQDNAKNTVY |
| | IL10RβVHH- | LQMNNLKPEDTAMYYCAAEPLSRVYGGSCPTPTFDYWGQG |
| | ASH6 | TQVTVSSGGGSQVQLQESGGGSVQAGGSLRLSCAASRYTY |
| | | NSYCMGWFRQAPGKEREGVATIDSDGMTRYADSVKGRFTI |
| | | SKDNAKNTLYLQMNSLKPEDTAMYYCAADADCTIAAMTTN |
| | | PLGQGTQVTVSSASHHHHHH |
| 223 | IL10Rα V_{H}H- | QVQLQESGGGSVQAGGSLRLSCTVSGYTYSSNCMGWFRQA |
| | GGGS- | PGKEREGVATIYTGGGNTYYADSVKGRFTISQDNAKNTVY |
| | IL10RβVHH- | LQMNNLKPEDTAMYYCAAEPLSRVYGGSCPTPTFDYWGQG |
| | ASH6 | TQVTVSSGGGSQVQLQESGGGSVQAGGSLRLSCTVSRYTA |
| | | SVNYMGWFRQAPGKEREGVATIFTGAGTTYYANSVKGRFT |
| | | ISRDNAKNTAYLQMNSLKPEDTAIYYCAVDFRGGLLYRPA |
| | | YEYTYRGQGTQVTVSSASHHHHHH |
| 224 | IL10Rα V_{H}H- | QVQLQESGGGSVQAGGSLRLSCTVSGYTYSSNCMGWFRQA |
| | GGGS- | PGKEREGVATIYTGGGNTYYADSVKGRFTISQDNAKNTVY |
| | IL10RβVHH- | LQMNNLKPEDTAMYYCAAEPLSRVYGGSCPTPTFDYWGQG |
| | ASH6 | TQVTVSSGGGSQVQLQESGGGSVEAGGSLRLSCAASGYTH |
| | | SSYCMGWFRQAPGKEREGVAAIDVDGSTTYADSVKGRFTI |
| | | SKDNAKNTLYLQMNSLKPEDTGMYYCAAEFADCSSNYFLP |
| | | PGAVRYWGQGTQVTVSSASHHHHHH |
| 225 | IL10Rα V_{H}H- | QVQLQESGGGSVQAGGSLRLSCTVSGYTYSSNCMGWFRQA |
| | GGGS- | PGKEREGVATIYTGGGNTYYADSVKGRFTISQDNAKNTVY |
| | IL10RβVHH- | LQMNNLKPEDTAMYYCAAEPLSRVYGGSCPTPTFDYWGQG |
| | ASH6 | TQVTVSSGGGSQVQLQESGGGSVQAGGSLRLSCAASGYSY |
| | | SSYCMGWFRQAPGKEREGVATIDSDGMTRYADSVKGRFTI |
| | | SKDNAKNTLYLQMNSLKPEDTAMYYCAAPLYDCDSGAVGR |
| | | NPPYWGQGTQVTVSSASHHHHHH |
| 226 | IL10Rα V_{H}H- | QVQLQESGGGSVQAGGSLRLSCTVSGYTYSSNCMGWFRQA |
| | GGGS | PGKEREGVATIYTGGGNTYYADSVKGRFTISQDNAKNTVY |
| | IL10RβVHH- | LQMNNLKPEDTAMYYCAAEPLSRVYGGSCPTPTFDYWGQG |
| | ASH6 | TQVTVSSGGGSQVQLQESGGGSVQTGGSLRLSCAASGYTY |
| | | LRGCMGWFRQAPGKEREGVAVMDVVGDRRSYIDSVKGRFT |
| | | ISRDNAANSVYLQMDNLKPEDTAMYYCTAGPNCVGWRSGL |
| | | DYWGQGTQVTVSSASHHHHHH |
| 227 | IL10Rα V_{H}H- | QVQLQESGGGSVQAGGSLRLSCGASGYTYSSYCMGWFRQV |
| | GGGS- | PGKEREGVAVIDSDGSTSYADSVKGRFTISKDNGKNTLYL |
| | IL10RβVHH- | QMNSLKPEDTAMYYCAADLGHYRPPCGVLYLGMDYWGKGT |
| | ASH6 | QVTVSSGGGSQVQLQESGGGSVQAGGSLRLSCAASGYTYS |
| | | SGCMGWFRQAPGKEREAVAAINSDGSTSYADSVKGRFTIS |
| | | KDNAKNTLYLQMNSLKPEDTAMYYCAAEPYCSGGYPRWSV |
| | | AEFGYWGQGTQVTVSSASHHHHHH |
| 228 | IL10Rα V_{H}H- | QVQLQESGGGSVQAGGSLRLSCGASGYTYSSYCMGWFRQV |
| | GGGS- | PGKEREGVAVIDSDGSTSYADSVKGRFTISKDNGKNTLYL |
| | IL10RβVHH- | QMNSLKPEDTAMYYCAADLGHYRPPCGVLYLGMDYWGKGT |
| | ASH6 | QVTVSSGGGSQVQLQESGGGSVQAGGSLRLSCAASGYTYS |
| | | SYCMGWFRQAPGKEREGVAHIDSDGSTSYADSVKGRFTIS |
| | | KDNAKNTLYLQMNSLKPEDTAMYYCAADPIPGPGYCDGGP |
| | | NKYWGQGTQVTVSSASHHHHHH |
| 229 | IL10Rα V_{H}H- | QVQLQESGGGSVQAGGSLRLSCGASGYTYSSYCMGWFRQV |
| | GGGS- | PGKEREGVAVIDSDGSTSYADSVKGRFTISKDNGKNTLYL |
| | IL10RβVHH- | QMNSLKPEDTAMYYCAADLGHYRPPCGVLYLGMDYWGKGT |
| | ASH6 | QVTVSSGGGSQVQLQESGGGSVQAGGSLRLSCAASRYTYN |
| | | SYCMGWFRQAPGKEREGVATIDSDGMTRYADSVKGRFTIS |
| | | KDNAKNTLYLQMNSLKPEDTAMYYCAADADCTIAAMTTNP |
| | | LGQGTQVTVSSASHHHHHH |
| 230 | IL10Rα V_{H}H- | QVQLQESGGGSVQAGGSLRLSCGASGYTYSSYCMGWFRQV |
| | GGGS- | PGKEREGVAVIDSDGSTSYADSVKGRFTISKDNGKNTLYL |
| | IL10RβVHH- | QMNSLKPEDTAMYYCAADLGHYRPPCGVLYLGMDYWGKGT |
| | ASH6 | QVTVSSGGGSQVQLQESGGGSVQAGGSLRLSCTVSRYTAS |
| | | VNYMGWFRQAPGKEREGVATIFTGAGTTYYANSVKGRFTI |
| | | SRDNAKNTAYLQMNSLKPEDTAIYYCAVDFRGGLLYRPAY |
| | | EYTYRGQGTQVTVSSASHHHHHH |
| 231 | IL10Rα V_{H}H- | QVQLQESGGGSVQAGGSLRLSCGASGYTYSSYCMGWFRQV |
| | GGGS- | PGKEREGVAVIDSDGSTSYADSVKGRFTISKDNGKNTLYL |
| | IL10RβVHH- | QMNSLKPEDTAMYYCAADLGHYRPPCGVLYLGMDYWGKGT |
| | ASH6 | QVTVSSGGGSQVQLQESGGGSVEAGGSLRLSCAASGYTHS |
| | | SYCMGWFRQAPGKEREGVAAIDVDGSTTYADSVKGRFTIS |
| | | KDNAKNTLYLQMNSLKPEDTGMYYCAAEFADCSSNYFLPP |
| | | GAVRYWGQGTQVTVSSASHHHHHH |
| 232 | IL10Rα V_{H}H- | QVQLQESGGGSVQAGGSLRLSCGASGYTYSSYCMGWFRQV |
| | GGGS- | PGKEREGVAVIDSDGSTSYADSVKGRFTISKDNGKNTLYL |
| | IL10RβVHH- | QMNSLKPEDTAMYYCAADLGHYRPPCGVLYLGMDYWGKGT |
| | ASH6 | QVTVSSGGGSQVQLQESGGGSVQAGGSLRLSCAASGYSYS |
| | | SYCMGWFRQAPGKEREGVATIDSDGMTRYADSVKGRFTIS |
| | | KDNAKNTLYLQMNSLKPEDTAMYYCAAPLYDCDSGAVGRN |
| | | PPYWGQGTQVTVSSASHHHHHH |
| 233 | IL10Rα V_{H}H- | QVQLQESGGGSVQAGGSLRLSCGASGYTYSSYCMGWFRQV |
| | GGGS- | PGKEREGVAVIDSDGSTSYADSVKGRFTISKDNGKNTLYL |
| | IL10RβVHH- | QMNSLKPEDTAMYYCAADLGHYRPPCGVLYLGMDYWGKGT |
| | ASH6 | QVTVSSGGGSQVQLQESGGGSVQTGGSLRLSCAASGYTYL |
| | | RGCMGWFRQAPGKEREGVAVMDVVGDRRSYIDSVKGRFTI |
| | | SRDNAANSVYLQMDNLKPEDTAMYYCTAGPNCVGWRSGLD |
| | | YWGQGTQVTVSSASHHHHHH |
| 234 | IL10Rα V_{H}H- | QVQLQESGGGSVQAGGSLRLSCAASGYSNCSYDMTWYRQA |
| | GGGS- | PGKEREFVSAIHSDGSTRYADSVKGRFFISQDNAKNTVYL |
| | IL10RβVHH- | QMNSLKPEDTAMYYCKTDPLHCRAHGGSWYSVRANYWGQG |
| | ASH6 | TQVTVSSGGGSQVQLQESGGGSVQAGGSLRLSCAASGYTY |
| | | SSGCMGWFRQAPGKEREAVAAINSDGSTSYADSVKGRFTI |
| | | SKDNAKNTLYLQMNSLKPEDTAMYYCAAEPYCSGGYPRWS |
| | | VAEFGYWGQGTQVTVSSASHHHHHH |
| 235 | IL10Rα V_{H}H- | QVQLQESGGGSVQAGGSLRLSCAASGYSNCSYDMTWYRQA |
| | GGGS- | PGKEREFVSAIHSDGSTRYADSVKGRFFISQDNAKNTVYL |
| | IL10RβVHH- | QMNSLKPEDTAMYYCKTDPLHCRAHGGSWYSVRANYWGQG |
| | ASH6 | TQVTVSSGGGSQVQLQESGGGSVQAGGSLRLSCAASGYTY |
| | | SSYCMGWFRQAPGKEREGVAHIDSDGSTSYADSVKGRFTI |
| | | SKDNAKNTLYLQMNSLKPEDTAMYYCAADPIPGPGYCDGG |
| | | PNKYWGQGTQVTVSSASHHHHHH |
| 236 | IL10Rα V_{H}H- | QVQLQESGGGSVQAGGSLRLSCAASGYSNCSYDMTWYRQA |
| | GGGS- | PGKEREFVSAIHSDGSTRYADSVKGRFFISQDNAKNTVYL |
| | IL10RβVHH- | QMNSLKPEDTAMYYCKTDPLHCRAHGGSWYSVRANYWGQG |
| | ASH6 | TQVTVSSGGGSQVQLQESGGGSVQAGGSLRLSCAASRYTY |
| | | NSYCMGWFRQAPGKEREGVATIDSDGMTRYADSVKGRFTI |
| | | SKDNAKNTLYLQMNSLKPEDTAMYYCAADADCTIAAMTTN |
| | | PLGQGTQVTVSSASHHHHHH |
| 237 | IL10Rα V_{H}H- | QVQLQESGGGSVQAGGSLRLSCAASGYSNCSYDMTWYRQA |
| | GGGS- | PGKEREFVSAIHSDGSTRYADSVKGRFFISQDNAKNTVYL |
| | IL10RβVHH- | QMNSLKPEDTAMYYCKTDPLHCRAHGGSWYSVRANYWGQG |
| | ASH6 | TQVTVSSGGGSQVQLQESGGGSVQAGGSLRLSCTVSRYTA |
| | | SVNYMGWFRQAPGKEREGVATIFTGAGTTYYANSVKGRFT |
| | | ISRDNAKNTAYLQMNSLKPEDTAIYYCAVDFRGGLLYRPA |
| | | YEYTYRGQGTQVTVSSASHHHHHH |
| 238 | IL10Rα V_{H}H- | QVQLQESGGGSVQAGGSLRLSCAASGYSNCSYDMTWYRQA |
| | GGGS- | PGKEREFVSAIHSDGSTRYADSVKGRFFISQDNAKNTVYL |
| | IL10RβVHH- | QMNSLKPEDTAMYYCKTDPLHCRAHGGSWYSVRANYWGQG |
| | ASH6 | TQVTVSSGGGSQVQLQESGGGSVEAGGSLRLSCAASGYTH |
| | | SSYCMGWFRQAPGKEREGVAAIDVDGSTTYADSVKGRFTI |
| | | SKDNAKNTLYLQMNSLKPEDTGMYYCAAEFADCSSNYFLP |
| | | PGAVRYWGQGTQVTVSSASHHHHHH |
| 239 | IL10Rα V_{H}H- | QVQLQESGGGSVQAGGSLRLSCAASGYSNCSYDMTWYRQA |
| | GGGS- | PGKEREFVSAIHSDGSTRYADSVKGRFFISQDNAKNTVYL |
| | IL10RβVHH- | QMNSLKPEDTAMYYCKTDPLHCRAHGGSWYSVRANYWGQG |
| | ASH6 | TQVTVSSGGGSQVQLQESGGGSVQAGGSLRLSCAASGYSY |
| | | SSYCMGWFRQAPGKEREGVATIDSDGMTRYADSVKGRFTI |
| | | SKDNAKNTLYLQMNSLKPEDTAMYYCAAPLYDCDSGAVGR |
| | | NPPYWGQGTQVTVSSASHHHHHH |
| 240 | IL10Rα V_{H}H- | QVQLQESGGGSVQAGGSLRLSCAASGYSNCSYDMTWYRQA |
| | GGGS- | PGKEREFVSAIHSDGSTRYADSVKGRFFISQDNAKNTVYL |
| | IL10RβVHH- | QMNSLKPEDTAMYYCKTDPLHCRAHGGSWYSVRANYWGQG |
| | ASH6 | TQVTVSSGGGSQVQLQESGGGSVQTGGSLRLSCAASGYTY |
| | | LRGCMGWFRQAPGKEREGVAVMDVVGDRRSYIDSVKGRFT |
| | | ISRDNAANSVYLQMDNLKPEDTAMYYCTAGPNCVGWRSGL |
| | | DYWGQGTQVTVSSASHHHHHH |
| 241 | IL10RβVHH- | QVQLQESGGGSVQAGGSLRLSCAASGYTYSSGCMGWFRQA |
| | GGGS- | PGKEREAVAAINSDGSTSYADSVKGRFTISKDNAKNTLYL |
| | IL10Rα V_{H}H- | QMNSLKPEDTAMYYCAAEPYCSGGYPRWSVAEFGYWGQGT |
| | ASH6 | QVTVSSGGGSQVQLQESGGGSVQAGGSLRLSCAASRYLYS |
| | | IDYMAWFRQSPGKEREPVAVIYTASGATFYPDSVKGRFTI |
| | | SQDNAKMTVYLQMNSLKSEDTAMYYCAAVRKTDSYLFDAQ |
| | | SFTYWGQGTQVTVSSASHHHHHH |
| 242 | IL10RβVHH- | QVQLQESGGGSVQAGGSLRLSCAASGYTYSSGCMGWFRQA |
| | GGGS- | PGKEREAVAAINSDGSTSYADSVKGRFTISKDNAKNTLYL |
| | IL10Rα V_{H}H- | QMNSLKPEDTAMYYCAAEPYCSGGYPRWSVAEFGYWGQGT |
| | ASH6 | QVTVSSGGGSQVQLQESGGGSVQAGGSLRLSCAASRFTYS |
| | | SYCMGWFRQAPGKEREGVASIDSDGSTSYTDSVKGRFTIS |
| | | KDNAKNTLYLQMNSLKPEDTAMYYCALDLMSTVVPGFCGF |
| | | LLSAGMDYWGKGTQVTVSSASHHHHHH |
| 243 | IL10RβVHH- | QVQLQESGGGSVQAGGSLRLSCAASGYTYSSGCMGWFRQA |
| | GGGS- | PGKEREAVAAINSDGSTSYADSVKGRFTISKDNAKNTLYL |
| | IL10Rα V_{H}H- | QMNSLKPEDTAMYYCAAEPYCSGGYPRWSVAEFGYWGQGT |
| | ASH6 | QVTVSSGGGSQVQLQESGGGSVQAGGSLRLSCAASGYTYS |
| | | MYCMGWFRQAPGKEREGVAQINSDGSTSYADSVKGRFTIS |
| | | KDNAKNTLYLQMNSLKPEDTAMYYCAADSRVYGGSWYERL |
| | | CGPYTYEYNYWGQGTQVTVSSASHHHHHH |
| 244 | IL10RβVHH- | QVQLQESGGGSVQAGGSLRLSCAASGYTYSSGCMGWFRQA |
| | GGGS- | PGKEREAVAAINSDGSTSYADSVKGRFTISKDNAKNTLYL |
| | IL10Rα V_{H}H- | QMNSLKPEDTAMYYCAAEPYCSGGYPRWSVAEFGYWGQGT |
| | ASH6 | QVTVSSGGGSQVQLQESGGGSVQAGGSLRLSCAVSGYAYS |
| | | TYCMGWFRQAPGKEREGVAAIDSGGSTSYADSVKGRFTIS |
| | | KDNAKNTLYLRMNSLKPEDTAMYYCAAVPPPPDGGSCLFL |
| | | GPEIKVSKADFRYWGQGTQVTVSSASHHHHHH |
| 245 | IL10RβVHH- | QVQLQESGGGSVQAGGSLRLSCAASGYTYSSGCMGWFRQA |
| | GGGS- | PGKEREAVAAINSDGSTSYADSVKGRFTISKDNAKNTLYL |
| | IL10Rα V_{H}H- | QMNSLKPEDTAMYYCAAEPYCSGGYPRWSVAEFGYWGQGT |
| | ASH6 | QVTVSSGGGSQVQLQESGGGSVQAGGSLRLSCTVSGYTYS |
| | | SNCMGWFRQAPGKEREGVATIYTGGGNTYYADSVKGRFTI |
| | | SQDNAKNTVYLQMNNLKPEDTAMYYCAAEPLSRVYGGSCP |
| | | TPTFDYWGQGTQVTVSSASHHHHHH |
| 246 | IL10RβVHH- | QVQLQESGGGSVQAGGSLRLSCAASGYTYSSGCMGWFRQA |
| | GGGS- | PGKEREAVAAINSDGSTSYADSVKGRFTISKDNAKNTLYL |
| | IL10Rα V_{H}H- | QMNSLKPEDTAMYYCAAEPYCSGGYPRWSVAEFGYWGQGT |
| | ASH6 | QVTVSSGGGSQVQLQESGGGSVQAGGSLRLSCGASGYTYS |
| | | SYCMGWFRQVPGKEREGVAVIDSDGSTSYADSVKGRFTIS |
| | | KDNGKNTLYLQMNSLKPEDTAMYYCAADLGHYRPPCGVLY |
| | | LGMDYWGKGTQVTVSSASHHHHHH |
| 247 | IL10RβVHH- | QVQLQESGGGSVQAGGSLRLSCAASGYTYSSGCMGWFRQA |
| | GGGS- | PGKEREAVAAINSDGSTSYADSVKGRFTISKDNAKNTLYL |
| | IL10Rα V_{H}H- | QMNSLKPEDTAMYYCAAEPYCSGGYPRWSVAEFGYWGQGT |
| | ASH6 | QVTVSSGGGSQVQLQESGGGSVQAGGSLRLSCAASGYSNC |
| | | SYDMTWYRQAPGKEREFVSAIHSDGSTRYADSVKGRFFIS |
| | | QDNAKNTVYLQMNSLKPEDTAMYYCKTDPLHCRAHGGSWY |
| | | SVRANYWGQGTQVTVSSASHHHHHH |
| 248 | IL10RβVHH- | QVQLQESGGGSVQAGGSLRLSCAASGYTYSSYCMGWFRQA |
| | GGGS- | PGKEREGVAHIDSDGSTSYADSVKGRFTISKDNAKNTLYL |
| | IL10Rα V_{H}H- | QMNSLKPEDTAMYYCAADPIPGPGYCDGGPNKYWGQGTQV |
| | ASH6 | TVSSGGGSQVQLQESGGGSVQAGGSLRLSCAASRYLYSID |
| | | YMAWFRQSPGKEREPVAVIYTASGATFYPDSVKGRFTISQ |
| | | DNAKMTVYLQMNSLKSEDTAMYYCAAVRKTDSYLFDAQSF |
| | | TYWGQGTQVTVSSASHHHHHH |
| 249 | IL10RβVHH- | QVQLQESGGGSVQAGGSLRLSCAASGYTYSSYCMGWFRQA |
| | GGGS- | PGKEREGVAHIDSDGSTSYADSVKGRFTISKDNAKNTLYL |
| | IL10Rα V_{H}H- | QMNSLKPEDTAMYYCAADPIPGPGYCDGGPNKYWGQGTQV |
| | ASH6 | TVSSGGGSQVQLQESGGGSVQAGGSLRLSCAASRFTYSSY |
| | | CMGWFRQAPGKEREGVASIDSDGSTSYTDSVKGRFTISKD |
| | | NAKNTLYLQMNSLKPEDTAMYYCALDLMSTVVPGFCGFLL |
| | | SAGMDYWGKGTQVTVSSASHHHHHH |
| 250 | IL10RβVHH- | QVQLQESGGGSVQAGGSLRLSCAASGYTYSSYCMGWFRQA |
| | GGGS- | PGKEREGVAHIDSDGSTSYADSVKGRFTISKDNAKNTLYL |
| | IL10Rα V_{H}H- | QMNSLKPEDTAMYYCAADPIPGPGYCDGGPNKYWGQGTQV |
| | ASH6 | TVSSGGGSQVQLQESGGGSVQAGGSLRLSCAASGYTYSMY |
| | | CMGWFRQAPGKEREGVAQINSDGSTSYADSVKGRFTISKD |
| | | NAKNTLYLQMNSLKPEDTAMYYCAADSRVYGGSWYERLCG |
| | | PYTYEYNYWGQGTQVTVSSASHHHHHH |
| 251 | IL10RVHH- | QVQLQESGGGSVQAGGSLRLSCAASGYTYSSYCMGWFRQA |
| | GGGS- | PGKEREGVAHIDSDGSTSYADSVKGRFTISKDNAKNTLYL |
| | IL10Rα V_{H}H- | QMNSLKPEDTAMYYCAADPIPGPGYCDGGPNKYWGQGTQV |
| | ASH6 | TVSSGGGSQVQLQESGGGSVQAGGSLRLSCAVSGYAYSTY |
| | | CMGWFRQAPGKEREGVAAIDSGGSTSYADSVKGRFTISKD |
| | | NAKNTLYLRMNSLKPEDTAMYYCAAVPPPPDGGSCLFLGP |
| | | EIKVSKADFRYWGQGTQVTVSSASHHHHHH |
| 252 | IL10RβVHH- | QVQLQESGGGSVQAGGSLRLSCAASGYTYSSYCMGWFRQA |
| | GGGS- | PGKEREGVAHIDSDGSTSYADSVKGRFTISKDNAKNTLYL |
| | IL10Rα V_{H}H- | QMNSLKPEDTAMYYCAADPIPGPGYCDGGPNKYWGQGTQV |
| | ASH6 | TVSSGGGSQVQLQESGGGSVQAGGSLRLSCTVSGYTYSSN |
| | | CMGWFRQAPGKEREGVATIYTGGGNTYYADSVKGRFTISQ |
| | | DNAKNTVYLQMNNLKPEDTAMYYCAAEPLSRVYGGSCPTP |
| | | TFDYWGQGTQVTVSSASHHHHHH |
| 253 | IL10RβVHH- | QVQLQESGGGSVQAGGSLRLSCAASGYTYSSYCMGWFRQA |
| | GGGS- | PGKEREGVAHIDSDGSTSYADSVKGRFTISKDNAKNTLYL |
| | IL10Rα V_{H}H- | QMNSLKPEDTAMYYCAADPIPGPGYCDGGPNKYWGQGTQV |
| | ASH6 | TVSSGGGSQVQLQESGGGSVQAGGSLRLSCGASGYTYSSY |
| | | CMGWFRQVPGKEREGVAVIDSDGSTSYADSVKGRFTISKD |
| | | NGKNTLYLQMNSLKPEDTAMYYCAADLGHYRPPCGVLYLG |
| | | MDYWGKGTQVTVSSASHHHHHH |
| 254 | IL10RβVHH- | QVQLQESGGGSVQAGGSLRLSCAASGYTYSSYCMGWFRQA |
| | GGGS- | PGKEREGVAHIDSDGSTSYADSVKGRFTISKDNAKNTLYL |
| | IL10Rα V_{H}H- | QMNSLKPEDTAMYYCAADPIPGPGYCDGGPNKYWGQGTQV |
| | ASH6 | TVSSGGGSQVQLQESGGGSVQAGGSLRLSCAASGYSNCSY |
| | | DMTWYRQAPGKEREFVSAIHSDGSTRYADSVKGRFFISQD |
| | | NAKNTVYLQMNSLKPEDTAMYYCKTDPLHCRAHGGSWYSV |
| | | RANYWGQGTQVTVSSASHHHHHH |
| 255 | IL10RβVHH- | QVQLQESGGGSVQAGGSLRLSCAASRYTYNSYCMGWFRQA |
| | GGGS- | PGKEREGVATIDSDGMTRYADSVKGRFTISKDNAKNTLYL |
| | IL10Rα V_{H}H- | QMNSLKPEDTAMYYCAADADCTIAAMTTNPLGQGTQVTVS |
| | ASH6 | SGGGSQVQLQESGGGSVQAGGSLRLSCAASRYLYSIDYMA |
| | | WFRQSPGKEREPVAVIYTASGATFYPDSVKGRFTISQDNA |
| | | KMTVYLQMNSLKSEDTAMYYCAAVRKTDSYLFDAQSFTYW |
| | | GQGTQVTVSSASHHHHHH |
| 256 | IL10RβVHH- | QVQLQESGGGSVQAGGSLRLSCAASRYTYNSYCMGWFRQA |
| | GGGS- | PGKEREGVATIDSDGMTRYADSVKGRFTISKDNAKNTLYL |
| | IL10Rα V_{H}H- | QMNSLKPEDTAMYYCAADADCTIAAMTTNPLGQGTQVTVS |
| | ASH6 | SGGGSQVQLQESGGGSVQAGGSLRLSCAASRFTYSSYCMG |
| | | WFRQAPGKEREGVASIDSDGSTSYTDSVKGRFTISKDNAK |
| | | NTLYLQMNSLKPEDTAMYYCALDLMSTVVPGFCGFLLSAG |
| | | MDYWGKGTQVTVSSASHHHHHH |
| 257 | IL10RβVHH- | QVQLQESGGGSVQAGGSLRLSCAASRYTYNSYCMGWFRQA |
| | GGGS- | PGKEREGVATIDSDGMTRYADSVKGRFTISKDNAKNTLYL |
| | IL10Rα V_{H}H- | QMNSLKPEDTAMYYCAADADCTIAAMTTNPLGQGTQVTVS |
| | ASH6 | SGGGSQVQLQESGGGSVQAGGSLRLSCAASGYTYSMYCMG |
| | | WFRQAPGKEREGVAQINSDGSTSYADSVKGRFTISKDNAK |
| | | NTLYLQMNSLKPEDTAMYYCAADSRVYGGSWYERLCGPYT |
| | | YEYNYWGQGTQVTVSSASHHHHHH |
| 258 | IL10RβVHH- | QVQLQESGGGSVQAGGSLRLSCAASRYTYNSYCMGWFRQA |
| | GGGS- | PGKEREGVATIDSDGMTRYADSVKGRFTISKDNAKNTLYL |
| | IL10Rα V_{H}H- | QMNSLKPEDTAMYYCAADADCTIAAMTTNPLGQGTQVTVS |
| | ASH6 | SGGGSQVQLQESGGGSVQAGGSLRLSCAVSGYAYSTYCMG |
| | | WFRQAPGKEREGVAAIDSGGSTSYADSVKGRFTISKDNAK |
| | | NTLYLRMNSLKPEDTAMYYCAAVPPPPDGGSCLFLGPEIK |
| | | VSKADFRYWGQGTQVTVSSASHHHHHH |
| 259 | IL10RβVHH- | QVQLQESGGGSVQAGGSLRLSCAASRYTYNSYCMGWFRQA |
| | GGGS- | PGKEREGVATIDSDGMTRYADSVKGRFTISKDNAKNTLYL |
| | IL10Rα V_{H}H- | QMNSLKPEDTAMYYCAADADCTIAAMTTNPLGQGTQVTVS |
| | ASH6 | SGGGSQVQLQESGGGSVQAGGSLRLSCTVSGYTYSSNCMG |
| | | WFRQAPGKEREGVATIYTGGGNTYYADSVKGRFTISQDNA |
| | | KNTVYLQMNNLKPEDTAMYYCAAEPLSRVYGGSCPTPTFD |
| | | YWGQGTQVTVSSASHHHHHH |
| 260 | IL10RβVHH- | QVQLQESGGGSVQAGGSLRLSCAASRYTYNSYCMGWFRQA |
| | GGGS- | PGKEREGVATIDSDGMTRYADSVKGRFTISKDNAKNTLYL |
| | IL10Rα V_{H}H- | QMNSLKPEDTAMYYCAADADCTIAAMTTNPLGQGTQVTVS |
| | ASH6 | SGGGSQVQLQESGGGSVQAGGSLRLSCGASGYTYSSYCMG |
| | | WFRQVPGKEREGVAVIDSDGSTSYADSVKGRFTISKDNGK |
| | | NTLYLQMNSLKPEDTAMYYCAADLGHYRPPCGVLYLGMDY |
| | | WGKGTQVTVSSASHHHHHH |
| 261 | IL10RβVHH- | QVQLQESGGGSVQAGGSLRLSCAASRYTYNSYCMGWFRQA |
| | GGGS- | PGKEREGVATIDSDGMTRYADSVKGRFTISKDNAKNTLYL |
| | IL10Rα V_{H}H- | QMNSLKPEDTAMYYCAADADCTIAAMTTNPLGQGTQVTVS |
| | ASH6 | SGGGSQVQLQESGGGSVQAGGSLRLSCAASGYSNCSYDMT |
| | | WYRQAPGKEREFVSAIHSDGSTRYADSVKGRFFISQDNAK |
| | | NTVYLQMNSLKPEDTAMYYCKTDPLHCRAHGGSWYSVRAN |
| | | YWGQGTQVTVSSASHHHHHH |
| 262 | IL10RβVHH- | QVQLQESGGGSVQAGGSLRLSCTVSRYTASVNYMGWFRQA |
| | GGGS- | PGKEREGVATIFTGAGTTYYANSVKGRFTISRDNAKNTAY |
| | IL10Rα V_{H}H- | LQMNSLKPEDTAIYYCAVDFRGGLLYRPAYEYTYRGQGTQ |
| | ASH6 | VTVSSGGGSQVQLQESGGGSVQAGGSLRLSCAASRYLYSI |
| | | DYMAWFRQSPGKEREPVAVIYTASGATFYPDSVKGRFTIS |
| | | QDNAKMTVYLQMNSLKSEDTAMYYCAAVRKTDSYLFDAQS |
| | | FTYWGQGTQVTVSSASHHHHHH |
| 263 | IL10RβVHH- | QVQLQESGGGSVQAGGSLRLSCTVSRYTASVNYMGWFRQA |
| | GGGS- | PGKEREGVATIFTGAGTTYYANSVKGRFTISRDNAKNTAY |
| | IL10Rα V_{H}H- | LQMNSLKPEDTAIYYCAVDFRGGLLYRPAYEYTYRGQGTQ |
| | ASH6 | VTVSSGGGSQVQLQESGGGSVQAGGSLRLSCAASRFTYSS |
| | | YCMGWFRQAPGKEREGVASIDSDGSTSYTDSVKGRFTISK |
| | | DNAKNTLYLQMNSLKPEDTAMYYCALDLMSTVVPGFCGFL |
| | | LSAGMDYWGKGTQVTVSSASHHHHHH |
| 264 | IL10RβVHH- | QVQLQESGGGSVQAGGSLRLSCTVSRYTASVNYMGWFRQA |
| | GGGS- | PGKEREGVATIFTGAGTTYYANSVKGRFTISRDNAKNTAY |
| | IL10Rα V_{H}H- | LQMNSLKPEDTAIYYCAVDFRGGLLYRPAYEYTYRGQGTQ |
| | ASH6 | VTVSSGGGSQVQLQESGGGSVQAGGSLRLSCAASGYTYSM |
| | | YCMGWFRQAPGKEREGVAQINSDGSTSYADSVKGRFTISK |
| | | DNAKNTLYLQMNSLKPEDTAMYYCAADSRVYGGSWYERLC |
| | | GPYTYEYNYWGQGTQVTVSSASHHHHHH |
| 265 | IL10RβVHH- | QVQLQESGGGSVQAGGSLRLSCTVSRYTASVNYMGWFRQA |
| | GGGS- | PGKEREGVATIFTGAGTTYYANSVKGRFTISRDNAKNTAY |
| | IL10Rα V_{H}H- | LQMNSLKPEDTAIYYCAVDFRGGLLYRPAYEYTYRGQGTQ |
| | ASH6 | VTVSSGGGSQVQLQESGGGSVQAGGSLRLSCAVSGYAYST |
| | | YCMGWFRQAPGKEREGVAAIDSGGSTSYADSVKGRFTISK |
| | | DNAKNTLYLRMNSLKPEDTAMYYCAAVPPPPDGGSCLFLG |
| | | PEIKVSKADFRYWGQGTQVTVSSASHHHHHH |
| 266 | IL10RβVHH- | QVQLQESGGGSVQAGGSLRLSCTVSRYTASVNYMGWFRQA |
| | GGGS- | PGKEREGVATIFTGAGTTYYANSVKGRFTISRDNAKNTAY |
| | IL10Rα V_{H}H- | LQMNSLKPEDTAIYYCAVDFRGGLLYRPAYEYTYRGQGTQ |
| | ASH6 | VTVSSGGGSQVQLQESGGGSVQAGGSLRLSCTVSGYTYSS |
| | | NCMGWFRQAPGKEREGVATIYTGGGNTYYADSVKGRFTIS |
| | | QDNAKNTVYLQMNNLKPEDTAMYYCAAEPLSRVYGGSCPT |
| | | PTFDYWGQGTQVTVSSASHHHHHH |
| 267 | IL10RβVHH- | QVQLQESGGGSVQAGGSLRLSCTVSRYTASVNYMGWFRQA |
| | GGGS- | PGKEREGVATIFTGAGTTYYANSVKGRFTISRDNAKNTAY |
| | IL10Rα V_{H}H- | LQMNSLKPEDTAIYYCAVDFRGGLLYRPAYEYTYRGQGTQ |
| | ASH6 | VTVSSGGGSQVQLQESGGGSVQAGGSLRLSCGASGYTYSS |
| | | YCMGWFRQVPGKEREGVAVIDSDGSTSYADSVKGRFTISK |
| | | DNGKNTLYLQMNSLKPEDTAMYYCAADLGHYRPPCGVLYL |
| | | GMDYWGKGTQVTVSSASHHHHHH |
| 268 | IL10RβVHH- | QVQLQESGGGSVQAGGSLRLSCTVSRYTASVNYMGWFRQA |
| | GGGS- | PGKEREGVATIFTGAGTTYYANSVKGRFTISRDNAKNTAY |
| | IL10Rα V_{H}H- | LQMNSLKPEDTAIYYCAVDFRGGLLYRPAYEYTYRGQGTQ |
| | ASH6 | VTVSSGGGSQVQLQESGGGSVQAGGSLRLSCAASGYSNCS |
| | | YDMTWYRQAPGKEREFVSAIHSDGSTRYADSVKGRFFISQ |
| | | DNAKNTVYLQMNSLKPEDTAMYYCKTDPLHCRAHGGSWYS |
| | | VRANYWGQGTQVTVSSASHHHHHH |
| 269 | IL10RβVHH- | QVQLQESGGGSVEAGGSLRLSCAASGYTHSSYCMGWFRQA |
| | GGGS- | PGKEREGVAAIDVDGSTTYADSVKGRFTISKDNAKNTLYL |
| | IL10Rα V_{H}H- | QMNSLKPEDTGMYYCAAEFADCSSNYFLPPGAVRYWGQGT |
| | ASH6 | QVTVSSGGGSQVQLQESGGGSVQAGGSLRLSCAASRYLYS |
| | | IDYMAWFRQSPGKEREPVAVIYTASGATFYPDSVKGRFTI |
| | | SQDNAKMTVYLQMNSLKSEDTAMYYCAAVRKTDSYLFDAQ |
| | | SFTYWGQGTQVTVSSASHHHHHH |
| 270 | IL10RβVHH- | QVQLQESGGGSVEAGGSLRLSCAASGYTHSSYCMGWFRQA |
| | GGGS- | PGKEREGVAAIDVDGSTTYADSVKGRFTISKDNAKNTLYL |
| | IL10Rα V_{H}H- | QMNSLKPEDTGMYYCAAEFADCSSNYFLPPGAVRYWGQGT |
| | ASH6 | QVTVSSGGGSQVQLQESGGGSVQAGGSLRLSCAASRFTYS |
| | | SYCMGWFRQAPGKEREGVASIDSDGSTSYTDSVKGRFTIS |
| | | KDNAKNTLYLQMNSLKPEDTAMYYCALDLMSTVVPGFCGF |
| | | LLSAGMDYWGKGTQVTVSSASHHHHHH |
| 271 | IL10RβVHH- | QVQLQESGGGSVEAGGSLRLSCAASGYTHSSYCMGWFRQA |
| | GGGS- | PGKEREGVAAIDVDGSTTYADSVKGRFTISKDNAKNTLYL |
| | IL10Rα V_{H}H- | QMNSLKPEDTGMYYCAAEFADCSSNYFLPPGAVRYWGQGT |
| | ASH6 | QVTVSSGGGSQVQLQESGGGSVQAGGSLRLSCAASGYTYS |
| | | MYCMGWFRQAPGKEREGVAQINSDGSTSYADSVKGRFTIS |
| | | KDNAKNTLYLQMNSLKPEDTAMYYCAADSRVYGGSWYERL |
| | | CGPYTYEYNYWGQGTQVTVSSASHHHHHH |
| 272 | IL10RβVHH- | QVQLQESGGGSVEAGGSLRLSCAASGYTHSSYCMGWFRQA |
| | GGGS- | PGKEREGVAAIDVDGSTTYADSVKGRFTISKDNAKNTLYL |
| | IL10Rα V_{H}H- | QMNSLKPEDTGMYYCAAEFADCSSNYFLPPGAVRYWGQGT |
| | ASH6 | QVTVSSGGGSQVQLQESGGGSVQAGGSLRLSCAVSGYAYS |
| | | TYCMGWFRQAPGKEREGVAAIDSGGSTSYADSVKGRFTIS |
| | | KDNAKNTLYLRMNSLKPEDTAMYYCAAVPPPPDGGSCLFL |
| | | GPEIKVSKADFRYWGQGTQVTVSSASHHHHHH |
| 273 | IL10RβVHH- | QVQLQESGGGSVEAGGSLRLSCAASGYTHSSYCMGWFRQA |
| | GGGS- | PGKEREGVAAIDVDGSTTYADSVKGRFTISKDNAKNTLYL |
| | IL10Rα V_{H}H- | QMNSLKPEDTGMYYCAAEFADCSSNYFLPPGAVRYWGQGT |
| | ASH6 | QVTVSSGGGSQVQLQESGGGSVQAGGSLRLSCTVSGYTYS |
| | | SNCMGWFRQAPGKEREGVATIYTGGGNTYYADSVKGRFTI |
| | | SQDNAKNTVYLQMNNLKPEDTAMYYCAAEPLSRVYGGSCP |
| | | TPTFDYWGQGTQVTVSSASHHHHHH |
| 274 | IL10RβVHH- | QVQLQESGGGSVEAGGSLRLSCAASGYTHSSYCMGWFRQA |
| | GGGS- | PGKEREGVAAIDVDGSTTYADSVKGRFTISKDNAKNTLYL |
| | IL10Rα V_{H}H- | QMNSLKPEDTGMYYCAAEFADCSSNYFLPPGAVRYWGQGT |
| | ASH6 | QVTVSSGGGSQVQLQESGGGSVQAGGSLRLSCGASGYTYS |
| | | SYCMGWFRQVPGKEREGVAVIDSDGSTSYADSVKGRFTIS |
| | | KDNGKNTLYLQMNSLKPEDTAMYYCAADLGHYRPPCGVLY |
| | | LGMDYWGKGTQVTVSSASHHHHHH |
| 275 | IL10RβVHH- | QVQLQESGGGSVEAGGSLRLSCAASGYTHSSYCMGWFRQA |
| | GGGS- | PGKEREGVAAIDVDGSTTYADSVKGRFTISKDNAKNTLYL |
| | IL10Rα V_{H}H- | QMNSLKPEDTGMYYCAAEFADCSSNYFLPPGAVRYWGQGT |
| | ASH6 | QVTVSSGGGSQVQLQESGGGSVQAGGSLRLSCAASGYSNC |
| | | SYDMTWYRQAPGKEREFVSAIHSDGSTRYADSVKGRFFIS |
| | | QDNAKNTVYLQMNSLKPEDTAMYYCKTDPLHCRAHGGSWY |
| | | SVRANYWGQGTQVTVSSASHHHHHH |
| 276 | IL10RβVHH- | QVQLQESGGGSVQAGGSLRLSCAASGYSYSSYCMGWFRQA |
| | GGGS- | PGKEREGVATIDSDGMTRYADSVKGRFTISKDNAKNTLYL |
| | IL10Rα V_{H}H- | QMNSLKPEDTAMYYCAAPLYDCDSGAVGRNPPYWGQGTQV |
| | ASH6 | TVSSGGGSQVQLQESGGGSVQAGGSLRLSCAASRYLYSID |
| | | YMAWFRQSPGKEREPVAVIYTASGATFYPDSVKGRFTISQ |
| | | DNAKMTVYLQMNSLKSEDTAMYYCAAVRKTDSYLFDAQSF |
| | | TYWGQGTQVTVSSASHHHHHH |
| 277 | IL10RβVHH- | QVQLQESGGGSVQAGGSLRLSCAASGYSYSSYCMGWFRQA |
| | GGGS- | PGKEREGVATIDSDGMTRYADSVKGRFTISKDNAKNTLYL |
| | IL10Rα V_{H}H- | QMNSLKPEDTAMYYCAAPLYDCDSGAVGRNPPYWGQGTQV |
| | ASH6 | TVSSGGGSQVQLQESGGGSVQAGGSLRLSCAASRFTYSSY |
| | | CMGWFRQAPGKEREGVASIDSDGSTSYTDSVKGRFTISKD |
| | | NAKNTLYLQMNSLKPEDTAMYYCALDLMSTVVPGFCGFLL |
| | | SAGMDYWGKGTQVTVSSASHHHHHH |
| 278 | IL10RβVHH- | QVQLQESGGGSVQAGGSLRLSCAASGYSYSSYCMGWFRQA |
| | GGGS- | PGKEREGVATIDSDGMTRYADSVKGRFTISKDNAKNTLYL |
| | IL10Rα V_{H}H- | QMNSLKPEDTAMYYCAAPLYDCDSGAVGRNPPYWGQGTQV |
| | ASH6 | TVSSGGGSQVQLQESGGGSVQAGGSLRLSCAASGYTYSMY |
| | | CMGWFRQAPGKEREGVAQINSDGSTSYADSVKGRFTISKD |
| | | NAKNTLYLQMNSLKPEDTAMYYCAADSRVYGGSWYERLCG |
| | | PYTYEYNYWGQGTQVTVSSASHHHHHH |
| 279 | IL10RβVHH- | QVQLQESGGGSVQAGGSLRLSCAASGYSYSSYCMGWFRQA |
| | GGGS- | PGKEREGVATIDSDGMTRYADSVKGRFTISKDNAKNTLYL |
| | IL10Rα V_{H}H- | QMNSLKPEDTAMYYCAAPLYDCDSGAVGRNPPYWGQGTQV |
| | ASH6 | TVSSGGGSQVQLQESGGGSVQAGGSLRLSCAVSGYAYSTY |
| | | CMGWFRQAPGKEREGVAAIDSGGSTSYADSVKGRFTISKD |
| | | NAKNTLYLRMNSLKPEDTAMYYCAAVPPPPDGGSCLFLGP |
| | | EIKVSKADFRYWGQGTQVTVSSASHHHHHH |
| 280 | IL10RβVHH- | QVQLQESGGGSVQAGGSLRLSCAASGYSYSSYCMGWFRQA |
| | GGGS- | PGKEREGVATIDSDGMTRYADSVKGRFTISKDNAKNTLYL |
| | IL10Rα V_{H}H- | QMNSLKPEDTAMYYCAAPLYDCDSGAVGRNPPYWGQGTQV |
| | ASH6 | TVSSGGGSQVQLQESGGGSVQAGGSLRLSCTVSGYTYSSN |
| | | CMGWFRQAPGKEREGVATIYTGGGNTYYADSVKGRFTISQ |
| | | DNAKNTVYLQMNNLKPEDTAMYYCAAEPLSRVYGGSCPTP |
| | | TFDYWGQGTQVTVSSASHHHHHH |
| 281 | IL10RβVHH- | QVQLQESGGGSVQAGGSLRLSCAASGYSYSSYCMGWFRQA |
| | GGGS- | PGKEREGVATIDSDGMTRYADSVKGRFTISKDNAKNTLYL |
| | IL10Rα V_{H}H- | QMNSLKPEDTAMYYCAAPLYDCDSGAVGRNPPYWGQGTQV |
| | ASH6 | TVSSGGGSQVQLQESGGGSVQAGGSLRLSCGASGYTYSSY |
| | | CMGWFRQVPGKEREGVAVIDSDGSTSYADSVKGRFTISKD |
| | | NGKNTLYLQMNSLKPEDTAMYYCAADLGHYRPPCGVLYLG |
| | | MDYWGKGTQVTVSSASHHHHHH |
| 282 | IL10RβVHH- | QVQLQESGGGSVQAGGSLRLSCAASGYSYSSYCMGWFRQA |
| | GGGS- | PGKEREGVATIDSDGMTRYADSVKGRFTISKDNAKNTLYL |
| | IL10Rα V_{H}H- | QMNSLKPEDTAMYYCAAPLYDCDSGAVGRNPPYWGQGTQV |
| | ASH6 | TVSSGGGSQVQLQESGGGSVQAGGSLRLSCAASGYSNCSY |
| | | DMTWYRQAPGKEREFVSAIHSDGSTRYADSVKGRFFISQD |
| | | NAKNTVYLQMNSLKPEDTAMYYCKTDPLHCRAHGGSWYSV |
| | | RANYWGQGTQVTVSSASHHHHHH |
| 283 | IL10RβVHH- | QVQLQESGGGSVQTGGSLRLSCAASGYTYLRGCMGWFRQA |
| | GGGS- | PGKEREGVAVMDVVGDRRSYIDSVKGRFTISRDNAANSVY |
| | IL10Rα V_{H}H- | LQMDNLKPEDTAMYYCTAGPNCVGWRSGLDYWGQGTQVTV |
| | ASH6 | SSGGGSQVQLQESGGGSVQAGGSLRLSCAASRYLYSIDYM |
| | | AWFRQSPGKEREPVAVIYTASGATFYPDSVKGRFTISQDN |
| | | AKMTVYLQMNSLKSEDTAMYYCAAVRKTDSYLFDAQSFTY |
| | | WGQGTQVTVSSASHHHHHH |
| 284 | IL10RβVHH- | QVQLQESGGGSVQTGGSLRLSCAASGYTYLRGCMGWFRQA |
| | GGGS- | PGKEREGVAVMDVVGDRRSYIDSVKGRFTISRDNAANSVY |
| | IL10Rα V_{H}H- | LQMDNLKPEDTAMYYCTAGPNCVGWRSGLDYWGQGTQVTV |
| | ASH6 | SSGGGSQVQLQESGGGSVQAGGSLRLSCAASRFTYSSYCM |
| | | GWFRQAPGKEREGVASIDSDGSTSYTDSVKGRFTISKDNA |
| | | KNTLYLQMNSLKPEDTAMYYCALDLMSTVVPGFCGFLLSA |
| | | GMDYWGKGTQVTVSSASHHHHHH |
| 285 | IL10RβVHH- | QVQLQESGGGSVQTGGSLRLSCAASGYTYLRGCMGWFRQA |
| | GGGS- | PGKEREGVAVMDVVGDRRSYIDSVKGRFTISRDNAANSVY |
| | IL10Rα V_{H}H- | LQMDNLKPEDTAMYYCTAGPNCVGWRSGLDYWGQGTQVTV |
| | ASH6 | SSGGGSQVQLQESGGGSVQAGGSLRLSCAASGYTYSMYCM |
| | | GWFRQAPGKEREGVAQINSDGSTSYADSVKGRFTISKDNA |
| | | KNTLYLQMNSLKPEDTAMYYCAADSRVYGGSWYERLCGPY |
| | | TYEYNYWGQGTQVTVSSASHHHHHH |
| 286 | IL10RβVHH- | QVQLQESGGGSVQTGGSLRLSCAASGYTYLRGCMGWFRQA |
| | GGGS- | PGKEREGVAVMDVVGDRRSYIDSVKGRFTISRDNAANSVY |
| | IL10Rα V_{H}H- | LQMDNLKPEDTAMYYCTAGPNCVGWRSGLDYWGQGTQVTV |
| | ASH6 | SSGGGSQVQLQESGGGSVQAGGSLRLSCAVSGYAYSTYCM |
| | | GWFRQAPGKEREGVAAIDSGGSTSYADSVKGRFTISKDNA |
| | | KNTLYLRMNSLKPEDTAMYYCAAVPPPPDGGSCLFLGPEI |
| | | KVSKADFRYWGQGTQVTVSSASHHHHHH |
| 287 | IL10RβVHH- | QVQLQESGGGSVQTGGSLRLSCAASGYTYLRGCMGWFRQA |
| | GGGS- | PGKEREGVAVMDVVGDRRSYIDSVKGRFTISRDNAANSVY |
| | IL10Rα V_{H}H- | LQMDNLKPEDTAMYYCTAGPNCVGWRSGLDYWGQGTQVTV |
| | ASH6 | SSGGGSQVQLQESGGGSVQAGGSLRLSCTVSGYTYSSNCM |
| | | GWFRQAPGKEREGVATIYTGGGNTYYADSVKGRFTISQDN |
| | | AKNTVYLQMNNLKPEDTAMYYCAAEPLSRVYGGSCPTPTF |
| | | DYWGQGTQVTVSSASHHHHHH |
| 288 | IL10RβVHH- | QVQLQESGGGSVQTGGSLRLSCAASGYTYLRGCMGWFRQA |
| | GGGS- | PGKEREGVAVMDVVGDRRSYIDSVKGRFTISRDNAANSVY |
| | IL10Rα V_{H}H- | LQMDNLKPEDTAMYYCTAGPNCVGWRSGLDYWGQGTQVTV |
| | ASH6 | SSGGGSQVQLQESGGGSVQAGGSLRLSCGASGYTYSSYCM |
| | | GWFRQVPGKEREGVAVIDSDGSTSYADSVKGRFTISKDNG |
| | | KNTLYLQMNSLKPEDTAMYYCAADLGHYRPPCGVLYLGMD |
| | | YWGKGTQVTVSSASHHHHHH |
| 289 | IL10RβVHH- | QVQLQESGGGSVQTGGSLRLSCAASGYTYLRGCMGWFRQA |
| | GGGS- | PGKEREGVAVMDVVGDRRSYIDSVKGRFTISRDNAANSVY |
| | IL10Rα V_{H}H- | LQMDNLKPEDTAMYYCTAGPNCVGWRSGLDYWGQGTQVTV |
| | ASH6 | SSGGGSQVQLQESGGGSVQAGGSLRLSCAASGYSNCSYDM |
| | | TWYRQAPGKEREFVSAIHSDGSTRYADSVKGRFFISQDNA |
| | | KNTVYLQMNSLKPEDTAMYYCKTDPLHCRAHGGSWYSVRA |
| | | NYWGQGTQVTVSSASHHHHHH |
| 290 | DNA | CAAGTGCAGCTGCAAGAGAGCGGAGGAGGAAGCGTGCAAG |
| | Sequence | CCGGAGGCTCTCTGAGACTGAGCTGTGCCGCCTCTAGGTA |
| | Encoding | TCTGTACAGCATCGACTACATGGCTTGGTTCAGACAGAGC |
| | SEQ ID NO: | CCCGGCAAGGAGAGGGAGCCAGTGGCTGTCATCTACACTG |
| | 192 | CCTCCGGCGCCACATTCTATCCAGATAGCGTGAAGGGAAG |
| | | GTTCACTATCAGCCAAGATAACGCCAAGATGACAGTGTAT |
| | | CTGCAGATGAACTCTCTGAAGAGCGAGGACACTGCCATGT |
| | | ACTACTGTGCCGCCGTGAGGAAGACAGATAGCTACCTCTT |
| | | CGACGCCCAGAGCTTCACATACTGGGGCCAAGGCACACAA |
| | | GTGACAGTCTCGAGCGGCGGAGGATCCCAAGTGCAGCTGC |
| | | AAGAGAGCGGCGGAGGAAGCGTGCAAGCTGGAGGCTCTCT |
| | | GAGGCTGAGCTGTGCTGCCAGCGGCTACACTTATAGCAGC |
| | | GGCTGTATGGGCTGGTTCAGACAAGCCCCCGGCAAGGAAA |
| | | GGGAAGCCGTGGCCGCCATCAATTCCGATGGCAGCACAAG |
| | | CTACGCCGACAGCGTGAAGGGAAGGTTCACAATCAGCAAG |
| | | GACAACGCCAAGAACACACTCTATCTGCAGATGAACTCTC |
| | | TGAAGCCAGAGGACACAGCCATGTACTACTGCGCCGCTGA |
| | | GCCTTACTGTAGCGGCGGCTACCCAAGATGGAGCGTCGCT |
| | | GAGTTCGGCTACTGGGGCCAAGGCACACAAGTGACTGTCT |
| | | CGTCTGCTAGCCACCATCACCATCACCAC |
| 291 | DNA | CAAGTGCAGCTGCAAGAGAGCGGAGGAGGAAGCGTGCAAG |
| | Sequence | CCGGAGGCTCTCTGAGACTGAGCTGTGCCGCCTCTAGGTA |
| | Encoding | TCTGTACAGCATCGACTACATGGCTTGGTTCAGACAGAGC |
| | SEQ ID NO: | CCCGGCAAGGAGAGGGAGCCAGTGGCTGTCATCTACACTG |
| | 193 | CCTCCGGCGCCACATTCTATCCAGATAGCGTGAAGGGAAG |
| | | GTTCACTATCAGCCAAGATAACGCCAAGATGACAGTGTAT |
| | | CTGCAGATGAACTCTCTGAAGAGCGAGGACACTGCCATGT |
| | | ACTACTGTGCCGCCGTGAGGAAGACAGATAGCTACCTCTT |
| | | CGACGCCCAGAGCTTCACATACTGGGGCCAAGGCACACAA |
| | | GTGACAGTCTCGAGCGGCGGAGGATCCCAAGTGCAGCTGC |
| | | AAGAGAGCGGAGGAGGCAGCGTCCAAGCCGGAGGCTCTCT |
| | | GAGGCTGAGCTGTGCTGCCAGCGGCTACACTTACAGCAGC |
| | | TACTGCATGGGCTGGTTCAGACAAGCCCCCGGCAAGGAGA |
| | | GAGAGGGCGTGGCTCACATCGACAGCGACGGCTCCACAAG |
| | | CTACGCCGATAGCGTGAAGGGAAGGTTCACAATCTCCAAG |
| | | GACAACGCCAAGAACACTCTGTACCTCCAGATGAACTCTC |
| | | TGAAGCCAGAGGACACTGCCATGTACTACTGTGCCGCCGA |
| | | TCCAATTCCCGGCCCCGGCTACTGCGATGGCGGCCCTAAC |
| | | AAGTACTGGGGCCAAGGCACACAAGTGACTGTCTCGTCTG |
| | | CTAGCCACCATCACCATCACCAC |
| 292 | DNA | CAAGTGCAGCTGCAAGAGAGCGGAGGAGGAAGCGTGCAAG |
| | Sequence | CCGGAGGCTCTCTGAGACTGAGCTGTGCCGCCTCTAGGTA |
| | Encoding | TCTGTACAGCATCGACTACATGGCTTGGTTCAGACAGAGC |
| | SEQ ID NO: | CCCGGCAAGGAGAGGGAGCCAGTGGCTGTCATCTACACTG |
| | 194 | CCTCCGGCGCCACATTCTATCCAGATAGCGTGAAGGGAAG |
| | | GTTCACTATCAGCCAAGATAACGCCAAGATGACAGTGTAT |
| | | CTGCAGATGAACTCTCTGAAGAGCGAGGACACTGCCATGT |
| | | ACTACTGTGCCGCCGTGAGGAAGACAGATAGCTACCTCTT |
| | | CGACGCCCAGAGCTTCACATACTGGGGCCAAGGCACACAA |
| | | GTGACAGTCTCGAGCGGCGGAGGATCCCAAGTGCAGCTGC |
| | | AAGAGTCCGGAGGAGGAAGCGTGCAAGCCGGCGGATCTCT |
| | | GAGACTGAGCTGTGCCGCCTCTAGGTACACTTACAACAGC |
| | | TACTGCATGGGCTGGTTCAGACAAGCCCCCGGCAAGGAAA |
| | | GAGAGGGCGTGGCCACTATCGATAGCGACGGCATGACTAG |
| | | GTACGCTGATAGCGTCAAGGGAAGGTTCACAATCTCCAAG |
| | | GACAATGCTAAGAACACTCTGTACCTCCAGATGAACTCTC |
| | | TGAAGCCAGAGGACACAGCCATGTACTACTGCGCTGCCGA |
| | | TGCCGACTGCACTATCGCCGCCATGACTACTAATCCTCTG |
| | | GGCCAAGGCACACAAGTGACTGTCTCGTCTGCTAGCCACC |
| | | ATCACCATCACCAC |
| 293 | DNA | CAAGTGCAGCTGCAAGAGAGCGGAGGAGGAAGCGTGCAAG |
| | Sequence | CCGGAGGCTCTCTGAGACTGAGCTGTGCCGCCTCTAGGTA |
| | Encoding | TCTGTACAGCATCGACTACATGGCTTGGTTCAGACAGAGC |
| | SEQ ID NO: | CCCGGCAAGGAGAGGGAGCCAGTGGCTGTCATCTACACTG |
| | 195 | CCTCCGGCGCCACATTCTATCCAGATAGCGTGAAGGGAAG |
| | | GTTCACTATCAGCCAAGATAACGCCAAGATGACAGTGTAT |
| | | CTGCAGATGAACTCTCTGAAGAGCGAGGACACTGCCATGT |
| | | ACTACTGTGCCGCCGTGAGGAAGACAGATAGCTACCTCTT |
| | | CGACGCCCAGAGCTTCACATACTGGGGCCAAGGCACACAA |
| | | GTGACAGTCTCGAGCGGCGGAGGATCCCAAGTGCAGCTGC |
| | | AAGAGTCCGGCGGAGGCAGCGTCCAAGCCGGAGGATCTCT |
| | | GAGGCTGAGCTGTACAGTGAGCAGATACACTGCCAGCGTG |
| | | AACTACATGGGCTGGTTCAGACAAGCCCCCGGCAAAGAGA |
| | | GAGAGGGCGTGGCCACAATCTTCACTGGCGCCGGCACAAC |
| | | ATACTACGCCAACTCCGTCAAGGGAAGGTTCACAATCTCT |
| | | AGGGACAACGCCAAGAACACTGCCTATCTGCAGATGAACT |
| | | CCCTCAAGCCAGAGGACACTGCCATCTACTACTGCGCCGT |
| | | GGATTTCAGAGGCGGACTGCTGTATAGGCCAGCCTACGAG |
| | | TACACTTATAGGGGCCAAGGCACACAAGTGACAGTCTCGT |
| | | CTGCTAGCCACCATCACCATCACCAC |
| 294 | DNA | CAAGTGCAGCTGCAAGAGAGCGGAGGAGGAAGCGTGCAAG |
| | Sequence | CCGGAGGCTCTCTGAGACTGAGCTGTGCCGCCTCTAGGTA |
| | Encoding | TCTGTACAGCATCGACTACATGGCTTGGTTCAGACAGAGC |
| | SEQ ID NO: | CCCGGCAAGGAGAGGGAGCCAGTGGCTGTCATCTACACTG |
| | 196 | CCTCCGGCGCCACATTCTATCCAGATAGCGTGAAGGGAAG |
| | | GTTCACTATCAGCCAAGATAACGCCAAGATGACAGTGTAT |
| | | CTGCAGATGAACTCTCTGAAGAGCGAGGACACTGCCATGT |
| | | ACTACTGTGCCGCCGTGAGGAAGACAGATAGCTACCTCTT |
| | | CGACGCCCAGAGCTTCACATACTGGGGCCAAGGCACACAA |
| | | GTGACAGTCTCGAGCGGCGGAGGATCCCAAGTGCAGCTGC |
| | | AAGAGAGCGGAGGAGGCAGCGTCGAAGCTGGAGGATCTCT |
| | | GAGGCTGAGCTGTGCTGCCAGCGGCTACACTCACAGCAGC |
| | | TACTGTATGGGCTGGTTCAGACAAGCCCCCGGCAAGGAGA |
| | | GGGAAGGCGTGGCTGCCATCGACGTGGATGGCAGCACTAC |
| | | TTACGCCGACAGCGTGAAGGGAAGGTTCACTATCAGCAAG |
| | | GACAACGCCAAGAACACACTCTATCTGCAGATGAACAGCC |
| | | TCAAGCCAGAGGACACTGGCATGTACTACTGCGCCGCCGA |
| | | GTTCGCCGATTGCAGCAGCAACTACTTTCTGCCTCCCGGC |
| | | GCCGTCAGATATTGGGGCCAAGGCACTCAAGTGACAGTCT |
| | | CGTCTGCTAGCCACCATCACCATCACCAC |
| 295 | DNA | CAAGTGCAGCTGCAAGAGAGCGGAGGAGGAAGCGTGCAAG |
| | Sequence | CCGGAGGCTCTCTGAGACTGAGCTGTGCCGCCTCTAGGTA |
| | Encoding | TCTGTACAGCATCGACTACATGGCTTGGTTCAGACAGAGC |
| | SEQ ID NO: | CCCGGCAAGGAGAGGGAGCCAGTGGCTGTCATCTACACTG |
| | 197 | CCTCCGGCGCCACATTCTATCCAGATAGCGTGAAGGGAAG |
| | | GTTCACTATCAGCCAAGATAACGCCAAGATGACAGTGTAT |
| | | CTGCAGATGAACTCTCTGAAGAGCGAGGACACTGCCATGT |
| | | ACTACTGTGCCGCCGTGAGGAAGACAGATAGCTACCTCTT |
| | | CGACGCCCAGAGCTTCACATACTGGGGCCAAGGCACACAA |
| | | GTGACAGTCTCGAGCGGCGGAGGATCCCAAGTGCAGCTGC |
| | | AAGAGAGCGGAGGAGGAAGCGTCCAAGCCGGAGGATCTCT |
| | | GAGACTGAGCTGCGCCGCTAGTGGCTACTCCTACAGCAGC |
| | | TACTGCATGGGCTGGTTTAGGCAAGCCCCCGGCAAGGAGA |
| | | GAGAAGGCGTGGCCACTATCGACAGCGACGGCATGACAAG |
| | | GTACGCCGACAGCGTGAAGGGAAGGTTCACAATCAGCAAG |
| | | GACAACGCCAAGAACACACTGTATCTGCAGATGAACTCTC |
| | | TGAAGCCAGAGGACACTGCCATGTACTACTGTGCCGCTCC |
| | | TCTGTACGACTGTGATAGCGGCGCTGTGGGCAGAAATCCA |
| | | CCTTATTGGGGCCAAGGCACTCAAGTGACAGTCTCGTCTG |
| | | CTAGCCACCATCACCATCACCAC |
| 296 | DNA | CAAGTGCAGCTGCAAGAGAGCGGAGGAGGAAGCGTGCAAG |
| | Sequence | CCGGAGGCTCTCTGAGACTGAGCTGTGCCGCCTCTAGGTA |
| | Encoding | TCTGTACAGCATCGACTACATGGCTTGGTTCAGACAGAGC |
| | SEQ ID NO: | CCCGGCAAGGAGAGGGAGCCAGTGGCTGTCATCTACACTG |
| | 198 | CCTCCGGCGCCACATTCTATCCAGATAGCGTGAAGGGAAG |
| | | GTTCACTATCAGCCAAGATAACGCCAAGATGACAGTGTAT |
| | | CTGCAGATGAACTCTCTGAAGAGCGAGGACACTGCCATGT |
| | | ACTACTGTGCCGCCGTGAGGAAGACAGATAGCTACCTCTT |
| | | CGACGCCCAGAGCTTCACATACTGGGGCCAAGGCACACAA |
| | | GTGACAGTCTCGAGCGGCGGAGGATCCCAAGTGCAGCTGC |
| | | AAGAGAGCGGAGGCGGCAGCGTGCAGACTGGAGGCTCTCT |
| | | GAGACTGAGCTGTGCTGCCAGCGGCTACACTTATCTGAGG |
| | | GGCTGTATGGGCTGGTTTAGGCAAGCCCCCGGCAAGGAGA |
| | | GAGAGGGCGTGGCCGTCATGGATGTGGTGGGCGATAGGAG |
| | | AAGCTACATCGACAGCGTGAAGGGAAGGTTCACAATCTCT |
| | | AGGGACAATGCCGCCAACAGCGTCTATCTGCAGATGGACA |
| | | ATCTGAAGCCAGAGGACACAGCCATGTACTACTGCACTGC |
| | | CGGCCCTAACTGTGTGGGCTGGAGAAGCGGACTGGATTAC |
| | | TGGGGCCAAGGCACACAAGTGACAGTCTCGTCTGCTAGCC |
| | | ACCATCACCATCACCAC |
| 297 | DNA | CAAGTGCAGCTGCAAGAGAGCGGAGGAGGAAGCGTGCAAG |
| | Sequence | CCGGAGGCTCTCTGAGGCTGAGCTGTGCCGCCTCTAGGTT |
| | Encoding | CACATACAGCAGCTACTGCATGGGCTGGTTCAGACAAGCC |
| | SEQ ID NO: | CCCGGCAAAGAGAGAGAAGGCGTGGCCAGCATCGATAGCG |
| | 199 | ATGGCTCCACTAGCTACACTGACAGCGTGAAGGGAAGGTT |
| | | CACTATCAGCAAGGACAACGCCAAGAACACTCTGTATCTG |
| | | CAGATGAACTCTCTGAAGCCAGAGGACACAGCCATGTACT |
| | | ACTGTGCCCTCGATCTGATGAGCACAGTGGTGCCCGGCTT |
| | | CTGTGGCTTTCTGCTGAGCGCTGGCATGGATTACTGGGGC |
| | | AAGGGCACTCAAGTGACTGTCTCGAGCGGCGGAGGATCCC |
| | | AAGTGCAGCTGCAAGAGAGCGGCGGAGGAAGCGTGCAAGC |
| | | TGGAGGCTCTCTGAGGCTGAGCTGTGCTGCCAGCGGCTAC |
| | | ACTTATAGCAGCGGCTGTATGGGCTGGTTCAGACAAGCCC |
| | | CCGGCAAGGAAAGGGAAGCCGTGGCCGCCATCAATTCCGA |
| | | TGGCAGCACAAGCTACGCCGACAGCGTGAAGGGAAGGTTC |
| | | ACAATCAGCAAGGACAACGCCAAGAACACACTCTATCTGC |
| | | AGATGAACTCTCTGAAGCCAGAGGACACAGCCATGTACTA |
| | | CTGCGCCGCTGAGCCTTACTGTAGCGGCGGCTACCCAAGA |
| | | TGGAGCGTCGCTGAGTTCGGCTACTGGGGCCAAGGCACAC |
| | | AAGTGACTGTCTCGTCTGCTAGCCACCATCACCATCACCA |
| | | C |
| 298 | DNA | CAAGTGCAGCTGCAAGAGAGCGGAGGAGGAAGCGTGCAAG |
| | Sequence | CCGGAGGCTCTCTGAGGCTGAGCTGTGCCGCCTCTAGGTT |
| | Encoding | CACATACAGCAGCTACTGCATGGGCTGGTTCAGACAAGCC |
| | SEQ ID NO: | CCCGGCAAAGAGAGAGAAGGCGTGGCCAGCATCGATAGCG |
| | 200 | ATGGCTCCACTAGCTACACTGACAGCGTGAAGGGAAGGTT |
| | | CACTATCAGCAAGGACAACGCCAAGAACACTCTGTATCTG |
| | | CAGATGAACTCTCTGAAGCCAGAGGACACAGCCATGTACT |
| | | ACTGTGCCCTCGATCTGATGAGCACAGTGGTGCCCGGCTT |
| | | CTGTGGCTTTCTGCTGAGCGCTGGCATGGATTACTGGGGC |
| | | AAGGGCACTCAAGTGACTGTCTCGAGCGGCGGAGGATCCC |
| | | AAGTGCAGCTGCAAGAGAGCGGAGGAGGCAGCGTCCAAGC |
| | | CGGAGGCTCTCTGAGGCTGAGCTGTGCTGCCAGCGGCTAC |
| | | ACTTACAGCAGCTACTGCATGGGCTGGTTCAGACAAGCCC |
| | | CCGGCAAGGAGAGAGAGGGCGTGGCTCACATCGACAGCGA |
| | | CGGCTCCACAAGCTACGCCGATAGCGTGAAGGGAAGGTTC |
| | | ACAATCTCCAAGGACAACGCCAAGAACACTCTGTACCTCC |
| | | AGATGAACTCTCTGAAGCCAGAGGACACTGCCATGTACTA |
| | | CTGTGCCGCCGATCCAATTCCCGGCCCCGGCTACTGCGAT |
| | | GGCGGCCCTAACAAGTACTGGGGCCAAGGCACACAAGTGA |
| | | CTGTCTCGTCTGCTAGCCACCATCACCATCACCAC |
| 299 | DNA | CAAGTGCAGCTGCAAGAGAGCGGAGGAGGAAGCGTGCAAG |
| | Sequence | CCGGAGGCTCTCTGAGGCTGAGCTGTGCCGCCTCTAGGTT |
| | Encoding | CACATACAGCAGCTACTGCATGGGCTGGTTCAGACAAGCC |
| | SEQ ID NO: | CCCGGCAAAGAGAGAGAAGGCGTGGCCAGCATCGATAGCG |
| | 201 | ATGGCTCCACTAGCTACACTGACAGCGTGAAGGGAAGGTT |
| | | CACTATCAGCAAGGACAACGCCAAGAACACTCTGTATCTG |
| | | CAGATGAACTCTCTGAAGCCAGAGGACACAGCCATGTACT |
| | | ACTGTGCCCTCGATCTGATGAGCACAGTGGTGCCCGGCTT |
| | | CTGTGGCTTTCTGCTGAGCGCTGGCATGGATTACTGGGGC |
| | | AAGGGCACTCAAGTGACTGTCTCGAGCGGCGGAGGATCCC |
| | | AAGTGCAGCTGCAAGAGTCCGGAGGAGGAAGCGTGCAAGC |
| | | CGGCGGATCTCTGAGACTGAGCTGTGCCGCCTCTAGGTAC |
| | | ACTTACAACAGCTACTGCATGGGCTGGTTCAGACAAGCCC |
| | | CCGGCAAGGAAAGAGAGGGCGTGGCCACTATCGATAGCGA |
| | | CGGCATGACTAGGTACGCTGATAGCGTCAAGGGAAGGTTC |
| | | ACAATCTCCAAGGACAATGCTAAGAACACTCTGTACCTCC |
| | | AGATGAACTCTCTGAAGCCAGAGGACACAGCCATGTACTA |
| | | CTGCGCTGCCGATGCCGACTGCACTATCGCCGCCATGACT |
| | | ACTAATCCTCTGGGCCAAGGCACACAAGTGACTGTCTCGT |
| | | CTGCTAGCCACCATCACCATCACCAC |
| 300 | DNA | CAAGTGCAGCTGCAAGAGAGCGGAGGAGGA |
| | Sequence | AGCGTGCAAGCCGGAGGCTCTCTGAGGCTG |
| | Encoding | AGCTGTGCCGCCTCTAGGTTCACATACAGC |
| | SEQ ID NO: | AGCTACTGCATGGGCTGGTTCAGACAAGCC |
| | 202 | CCCGGCAAAGAGAGAGAAGGCGTGGCCAGC |
| | | ATCGATAGCGATGGCTCCACTAGCTACACT |
| | | GACAGCGTGAAGGGAAGGTTCACTATCAGC |
| | | AAGGACAACGCCAAGAACACTCTGTATCTG |
| | | CAGATGAACTCTCTGAAGCCAGAGGACACA |
| | | GCCATGTACTACTGTGCCCTCGATCTGATG |
| | | AGCACAGTGGTGCCCGGCTTCTGTGGCTTT |
| | | CTGCTGAGCGCTGGCATGGATTACTGGGGC |
| | | AAGGGCACTCAAGTGACTGTCTCGAGCGGC |
| | | GGAGGATCCCAAGTGCAGCTGCAAGAGTCC |
| | | GGCGGAGGCAGCGTCCAAGCCGGAGGATCT |
| | | CTGAGGCTGAGCTGTACAGTGAGCAGATAC |
| | | ACTGCCAGCGTGAACTACATGGGCTGGTTC |
| | | AGACAAGCCCCCGGCAAAGAGAGAGAGGGC |
| | | GTGGCCACAATCTTCACTGGCGCCGGCACA |
| | | ACATACTACGCCAACTCCGTCAAGGGAAGG |
| | | TTCACAATCTCTAGGGACAACGCCAAGAAC |
| | | ACTGCCTATCTGCAGATGAACTCCCTCAAG |
| | | CCAGAGGACACTGCCATCTACTACTGCGCC |
| | | GTGGATTTCAGAGGCGGACTGCTGTATAGG |
| | | CCAGCCTACGAGTACACTTATAGGGGCCAA |
| | | GGCACACAAGTGACAGTCTCGTCTGCTAGC |
| | | CACCATCACCATCACCAC |
| 301 | DNA | CAAGTGCAGCTGCAAGAGAGCGGAGGAGGA |
| | Sequence | AGCGTGCAAGCCGGAGGCTCTCTGAGGCTG |
| | Encoding | AGCTGTGCCGCCTCTAGGTTCACATACAGC |
| | SEQ ID NO: | AGCTACTGCATGGGCTGGTTCAGACAAGCC |
| | 203 | CCCGGCAAAGAGAGAGAAGGCGTGGCCAGC |
| | | ATCGATAGCGATGGCTCCACTAGCTACACT |
| | | GACAGCGTGAAGGGAAGGTTCACTATCAGC |
| | | AAGGACAACGCCAAGAACACTCTGTATCTG |
| | | CAGATGAACTCTCTGAAGCCAGAGGACACA |
| | | GCCATGTACTACTGTGCCCTCGATCTGATG |
| | | AGCACAGTGGTGCCCGGCTTCTGTGGCTTT |
| | | CTGCTGAGCGCTGGCATGGATTACTGGGGC |
| | | AAGGGCACTCAAGTGACTGTCTCGAGCGGC |
| | | GGAGGATCCCAAGTGCAGCTGCAAGAGAGC |
| | | GGAGGAGGCAGCGTCGAAGCTGGAGGATCT |
| | | CTGAGGCTGAGCTGTGCTGCCAGCGGCTAC |
| | | ACTCACAGCAGCTACTGTATGGGCTGGTTC |
| | | AGACAAGCCCCCGGCAAGGAGAGGGAAGGC |
| | | GTGGCTGCCATCGACGTGGATGGCAGCACT |
| | | ACTTACGCCGACAGCGTGAAGGGAAGGTTC |
| | | ACTATCAGCAAGGACAACGCCAAGAACACA |
| | | CTCTATCTGCAGATGAACAGCCTCAAGCCA |
| | | GAGGACACTGGCATGTACTACTGCGCCGCC |
| | | GAGTTCGCCGATTGCAGCAGCAACTACTTT |
| | | CTGCCTCCCGGCGCCGTCAGATATTGGGGC |
| | | CAAGGCACTCAAGTGACAGTCTCGTCTGCT |
| | | AGCCACCATCACCATCACCAC |
| 302 | DNA | CAAGTGCAGCTGCAAGAGAGCGGAGGAGGA |
| | Sequence | AGCGTGCAAGCCGGAGGCTCTCTGAGGCTG |
| | Encoding | AGCTGTGCCGCCTCTAGGTTCACATACAGC |
| | SEQ ID NO: | AGCTACTGCATGGGCTGGTTCAGACAAGCC |
| | 204 | CCCGGCAAAGAGAGAGAAGGCGTGGCCAGC |
| | | ATCGATAGCGATGGCTCCACTAGCTACACT |
| | | GACAGCGTGAAGGGAAGGTTCACTATCAGC |
| | | AAGGACAACGCCAAGAACACTCTGTATCTG |
| | | CAGATGAACTCTCTGAAGCCAGAGGACACA |
| | | GCCATGTACTACTGTGCCCTCGATCTGATG |
| | | AGCACAGTGGTGCCCGGCTTCTGTGGCTTT |
| | | CTGCTGAGCGCTGGCATGGATTACTGGGGC |
| | | AAGGGCACTCAAGTGACTGTCTCGAGCGGC |
| | | GGAGGATCCCAAGTGCAGCTGCAAGAGAGC |
| | | GGAGGAGGAAGCGTCCAAGCCGGAGGATCT |
| | | CTGAGACTGAGCTGCGCCGCTAGTGGCTAC |
| | | TCCTACAGCAGCTACTGCATGGGCTGGTTT |
| | | AGGCAAGCCCCCGGCAAGGAGAGAGAAGGC |
| | | GTGGCCACTATCGACAGCGACGGCATGACA |
| | | AGGTACGCCGACAGCGTGAAGGGAAGGTTC |
| | | ACAATCAGCAAGGACAACGCCAAGAACACA |
| | | CTGTATCTGCAGATGAACTCTCTGAAGCCA |
| | | GAGGACACTGCCATGTACTACTGTGCCGCT |
| | | CCTCTGTACGACTGTGATAGCGGCGCTGTG |
| | | GGCAGAAATCCACCTTATTGGGGCCAAGGC |
| | | ACTCAAGTGACAGTCTCGTCTGCTAGCCAC |
| | | CATCACCATCACCAC |
| 303 | DNA | CAAGTGCAGCTGCAAGAGAGCGGAGGAGGA |
| | Sequence | AGCGTGCAAGCCGGAGGCTCTCTGAGGCTG |
| | Encoding | AGCTGTGCCGCCTCTAGGTTCACATACAGC |
| | SEQ ID NO: | AGCTACTGCATGGGCTGGTTCAGACAAGCC |
| | 205 | CCCGGCAAAGAGAGAGAAGGCGTGGCCAGC |
| | | ATCGATAGCGATGGCTCCACTAGCTACACT |
| | | GACAGCGTGAAGGGAAGGTTCACTATCAGC |
| | | AAGGACAACGCCAAGAACACTCTGTATCTG |
| | | CAGATGAACTCTCTGAAGCCAGAGGACACA |
| | | GCCATGTACTACTGTGCCCTCGATCTGATG |
| | | AGCACAGTGGTGCCCGGCTTCTGTGGCTTT |
| | | CTGCTGAGCGCTGGCATGGATTACTGGGGC |
| | | AAGGGCACTCAAGTGACTGTCTCGAGCGGC |
| | | GGAGGATCCCAAGTGCAGCTGCAAGAGAGC |
| | | GGAGGCGGCAGCGTGCAGACTGGAGGCTCT |
| | | CTGAGACTGAGCTGTGCTGCCAGCGGCTAC |
| | | ACTTATCTGAGGGGCTGTATGGGCTGGTTT |
| | | AGGCAAGCCCCCGGCAAGGAGAGAGAGGGC |
| | | GTGGCCGTCATGGATGTGGTGGGCGATAGG |
| | | AGAAGCTACATCGACAGCGTGAAGGGAAGG |
| | | TTCACAATCTCTAGGGACAATGCCGCCAAC |
| | | AGCGTCTATCTGCAGATGGACAATCTGAAG |
| | | CCAGAGGACACAGCCATGTACTACTGCACT |
| | | GCCGGCCCTAACTGTGTGGGCTGGAGAAGC |
| | | GGACTGGATTACTGGGGCCAAGGCACACAA |
| | | GTGACAGTCTCGTCTGCTAGCCACCATCAC |
| | | CATCACCAC |
| 304 | DNA | CAAGTGCAGCTGCAAGAGTCCGGAGGAGGC |
| | Sequence | AGCGTCCAAGCCGGAGGCTCTCTGAGGCTG |
| | Encoding | AGCTGTGCTGCCAGCGGCTACACTTACAGC |
| | SEQ ID NO: | ATGTACTGCATGGGCTGGTTCAGACAAGCC |
| | 206 | CCCGGCAAGGAAAGAGAGGGCGTGGCCCAG |
| | | ATCAATAGCGATGGCAGCACAAGCTACGCC |
| | | GACAGCGTGAAGGGAAGGTTCACTATCTCC |
| | | AAGGACAACGCCAAGAACACTCTGTATCTG |
| | | CAGATGAACTCTCTGAAGCCAGAGGACACT |
| | | GCCATGTACTACTGCGCTGCCGATTCTAGG |
| | | GTGTACGGCGGCAGCTGGTATGAGAGGCTC |
| | | TGCGGCCCTTACACATACGAGTACAACTAC |
| | | TGGGGCCAAGGCACACAAGTGACTGTCTCG |
| | | AGCGGCGGAGGATCCCAAGTGCAGCTGCAA |
| | | GAGAGCGGCGGAGGAAGCGTGCAAGCTGGA |
| | | GGCTCTCTGAGGCTGAGCTGTGCTGCCAGC |
| | | GGCTACACTTATAGCAGCGGCTGTATGGGC |
| | | TGGTTCAGACAAGCCCCCGGCAAGGAAAGG |
| | | GAAGCCGTGGCCGCCATCAATTCCGATGGC |
| | | AGCACAAGCTACGCCGACAGCGTGAAGGGA |
| | | AGGTTCACAATCAGCAAGGACAACGCCAAG |
| | | AACACACTCTATCTGCAGATGAACTCTCTG |
| | | AAGCCAGAGGACACAGCCATGTACTACTGC |
| | | GCCGCTGAGCCTTACTGTAGCGGCGGCTAC |
| | | CCAAGATGGAGCGTCGCTGAGTTCGGCTAC |
| | | TGGGGCCAAGGCACACAAGTGACTGTCTCG |
| | | TCTGCTAGCCACCATCACCATCACCAC |
| 305 | DNA | CAAGTGCAGCTGCAAGAGTCCGGAGGAGGC |
| | Sequence | AGCGTCCAAGCCGGAGGCTCTCTGAGGCTG |
| | Encoding | AGCTGTGCTGCCAGCGGCTACACTTACAGC |
| | SEQ ID NO: | ATGTACTGCATGGGCTGGTTCAGACAAGCC |
| | 207 | CCCGGCAAGGAAAGAGAGGGCGTGGCCCAG |
| | | ATCAATAGCGATGGCAGCACAAGCTACGCC |
| | | GACAGCGTGAAGGGAAGGTTCACTATCTCC |
| | | AAGGACAACGCCAAGAACACTCTGTATCTG |
| | | CAGATGAACTCTCTGAAGCCAGAGGACACT |
| | | GCCATGTACTACTGCGCTGCCGATTCTAGG |
| | | GTGTACGGCGGCAGCTGGTATGAGAGGCTC |
| | | TGCGGCCCTTACACATACGAGTACAACTAC |
| | | TGGGGCCAAGGCACACAAGTGACTGTCTCG |
| | | AGCGGCGGAGGATCCCAAGTGCAGCTGCAA |
| | | GAGAGCGGAGGAGGCAGCGTCCAAGCCGGA |
| | | GGCTCTCTGAGGCTGAGCTGTGCTGCCAGC |
| | | GGCTACACTTACAGCAGCTACTGCATGGGC |
| | | TGGTTCAGACAAGCCCCCGGCAAGGAGAGA |
| | | GAGGGCGTGGCTCACATCGACAGCGACGGC |
| | | TCCACAAGCTACGCCGATAGCGTGAAGGGA |
| | | AGGTTCACAATCTCCAAGGACAACGCCAAG |
| | | AACACTCTGTACCTCCAGATGAACTCTCTG |
| | | AAGCCAGAGGACACTGCCATGTACTACTGT |
| | | GCCGCCGATCCAATTCCCGGCCCCGGCTAC |
| | | TGCGATGGCGGCCCTAACAAGTACTGGGGC |
| | | CAAGGCACACAAGTGACTGTCTCGTCTGCT |
| | | AGCCACCATCACCATCACCAC |
| 306 | DNA | CAAGTGCAGCTGCAAGAGTCCGGAGGAGGC |
| | Sequence | AGCGTCCAAGCCGGAGGCTCTCTGAGGCTG |
| | Encoding | AGCTGTGCTGCCAGCGGCTACACTTACAGC |
| | SEQ ID NO: | ATGTACTGCATGGGCTGGTTCAGACAAGCC |
| | 208 | CCCGGCAAGGAAAGAGAGGGCGTGGCCCAG |
| | | ATCAATAGCGATGGCAGCACAAGCTACGCC |
| | | GACAGCGTGAAGGGAAGGTTCACTATCTCC |
| | | AAGGACAACGCCAAGAACACTCTGTATCTG |
| | | CAGATGAACTCTCTGAAGCCAGAGGACACT |
| | | GCCATGTACTACTGCGCTGCCGATTCTAGG |
| | | GTGTACGGCGGCAGCTGGTATGAGAGGCTC |
| | | TGCGGCCCTTACACATACGAGTACAACTAC |
| | | TGGGGCCAAGGCACACAAGTGACTGTCTCG |
| | | AGCGGCGGAGGATCCCAAGTGCAGCTGCAA |
| | | GAGTCCGGAGGAGGAAGCGTGCAAGCCGGC |
| | | GGATCTCTGAGACTGAGCTGTGCCGCCTCT |
| | | AGGTACACTTACAACAGCTACTGCATGGGC |
| | | TGGTTCAGACAAGCCCCCGGCAAGGAAAGA |
| | | GAGGGCGTGGCCACTATCGATAGCGACGGC |
| | | ATGACTAGGTACGCTGATAGCGTCAAGGGA |
| | | AGGTTCACAATCTCCAAGGACAATGCTAAG |
| | | AACACTCTGTACCTCCAGATGAACTCTCTG |
| | | AAGCCAGAGGACACAGCCATGTACTACTGC |
| | | GCTGCCGATGCCGACTGCACTATCGCCGCC |
| | | ATGACTACTAATCCTCTGGGCCAAGGCACA |
| | | CAAGTGACTGTCTCGTCTGCTAGCCACCAT |
| | | CACCATCACCAC |
| 307 | DNA | CAAGTGCAGCTGCAAGAGTCCGGAGGAGGC |
| | Sequence | AGCGTCCAAGCCGGAGGCTCTCTGAGGCTG |
| | Encoding | AGCTGTGCTGCCAGCGGCTACACTTACAGC |
| | SEQ ID NO: | ATGTACTGCATGGGCTGGTTCAGACAAGCC |
| | 209 | CCCGGCAAGGAAAGAGAGGGCGTGGCCCAG |
| | | ATCAATAGCGATGGCAGCACAAGCTACGCC |
| | | GACAGCGTGAAGGGAAGGTTCACTATCTCC |
| | | AAGGACAACGCCAAGAACACTCTGTATCTG |
| | | CAGATGAACTCTCTGAAGCCAGAGGACACT |
| | | GCCATGTACTACTGCGCTGCCGATTCTAGG |
| | | GTGTACGGCGGCAGCTGGTATGAGAGGCTC |
| | | TGCGGCCCTTACACATACGAGTACAACTAC |
| | | TGGGGCCAAGGCACACAAGTGACTGTCTCG |
| | | AGCGGCGGAGGATCCCAAGTGCAGCTGCAA |
| | | GAGTCCGGCGGAGGCAGCGTCCAAGCCGGA |
| | | GGATCTCTGAGGCTGAGCTGTACAGTGAGC |
| | | AGATACACTGCCAGCGTGAACTACATGGGC |
| | | TGGTTCAGACAAGCCCCCGGCAAAGAGAGA |
| | | GAGGGCGTGGCCACAATCTTCACTGGCGCC |
| | | GGCACAACATACTACGCCAACTCCGTCAAG |
| | | GGAAGGTTCACAATCTCTAGGGACAACGCC |
| | | AAGAACACTGCCTATCTGCAGATGAACTCC |
| | | CTCAAGCCAGAGGACACTGCCATCTACTAC |
| | | TGCGCCGTGGATTTCAGAGGCGGACTGCTG |
| | | TATAGGCCAGCCTACGAGTACACTTATAGG |
| | | GGCCAAGGCACACAAGTGACAGTCTCGTCT |
| | | GCTAGCCACCATCACCATCACCAC |
| 308 | DNA | CAAGTGCAGCTGCAAGAGTCCGGAGGAGGC |
| | Sequence | AGCGTCCAAGCCGGAGGCTCTCTGAGGCTG |
| | Encoding | AGCTGTGCTGCCAGCGGCTACACTTACAGC |
| | SEQ ID NO: | ATGTACTGCATGGGCTGGTTCAGACAAGCC |
| | 210 | CCCGGCAAGGAAAGAGAGGGCGTGGCCCAG |
| | | ATCAATAGCGATGGCAGCACAAGCTACGCC |
| | | GACAGCGTGAAGGGAAGGTTCACTATCTCC |
| | | AAGGACAACGCCAAGAACACTCTGTATCTG |
| | | CAGATGAACTCTCTGAAGCCAGAGGACACT |
| | | GCCATGTACTACTGCGCTGCCGATTCTAGG |
| | | GTGTACGGCGGCAGCTGGTATGAGAGGCTC |
| | | TGCGGCCCTTACACATACGAGTACAACTAC |
| | | TGGGGCCAAGGCACACAAGTGACTGTCTCG |
| | | AGCGGCGGAGGATCCCAAGTGCAGCTGCAA |
| | | GAGAGCGGAGGAGGCAGCGTCGAAGCTGGA |
| | | GGATCTCTGAGGCTGAGCTGTGCTGCCAGC |
| | | GGCTACACTCACAGCAGCTACTGTATGGGC |
| | | TGGTTCAGACAAGCCCCCGGCAAGGAGAGG |
| | | GAAGGCGTGGCTGCCATCGACGTGGATGGC |
| | | AGCACTACTTACGCCGACAGCGTGAAGGGA |
| | | AGGTTCACTATCAGCAAGGACAACGCCAAG |
| | | AACACACTCTATCTGCAGATGAACAGCCTC |
| | | AAGCCAGAGGACACTGGCATGTACTACTGC |
| | | GCCGCCGAGTTCGCCGATTGCAGCAGCAAC |
| | | TACTTTCTGCCTCCCGGCGCCGTCAGATAT |
| | | TGGGGCCAAGGCACTCAAGTGACAGTCTCG |
| | | TCTGCTAGCCACCATCACCATCACCAC |
| 309 | DNA | CAAGTGCAGCTGCAAGAGTCCGGAGGAGGC |
| | Sequence | AGCGTCCAAGCCGGAGGCTCTCTGAGGCTG |
| | Encoding | AGCTGTGCTGCCAGCGGCTACACTTACAGC |
| | SEQ ID NO: | ATGTACTGCATGGGCTGGTTCAGACAAGCC |
| | 211 | CCCGGCAAGGAAAGAGAGGGCGTGGCCCAG |
| | | ATCAATAGCGATGGCAGCACAAGCTACGCC |
| | | GACAGCGTGAAGGGAAGGTTCACTATCTCC |
| | | AAGGACAACGCCAAGAACACTCTGTATCTG |
| | | CAGATGAACTCTCTGAAGCCAGAGGACACT |
| | | GCCATGTACTACTGCGCTGCCGATTCTAGG |
| | | GTGTACGGCGGCAGCTGGTATGAGAGGCTC |
| | | TGCGGCCCTTACACATACGAGTACAACTAC |
| | | TGGGGCCAAGGCACACAAGTGACTGTCTCG |
| | | AGCGGCGGAGGATCCCAAGTGCAGCTGCAA |
| | | GAGAGCGGAGGAGGAAGCGTCCAAGCCGGA |
| | | GGATCTCTGAGACTGAGCTGCGCCGCTAGT |
| | | GGCTACTCCTACAGCAGCTACTGCATGGGC |
| | | TGGTTTAGGCAAGCCCCCGGCAAGGAGAGA |
| | | GAAGGCGTGGCCACTATCGACAGCGACGGC |
| | | ATGACAAGGTACGCCGACAGCGTGAAGGGA |
| | | AGGTTCACAATCAGCAAGGACAACGCCAAG |
| | | AACACACTGTATCTGCAGATGAACTCTCTG |
| | | AAGCCAGAGGACACTGCCATGTACTACTGT |
| | | GCCGCTCCTCTGTACGACTGTGATAGCGGC |
| | | GCTGTGGGCAGAAATCCACCTTATTGGGGC |
| | | CAAGGCACTCAAGTGACAGTCTCGTCTGCT |
| | | AGCCACCATCACCATCACCAC |
| 310 | DNA | CAAGTGCAGCTGCAAGAGTCCGGAGGAGGC |
| | Sequence | AGCGTCCAAGCCGGAGGCTCTCTGAGGCTG |
| | Encoding | AGCTGTGCTGCCAGCGGCTACACTTACAGC |
| | SEQ ID NO: | ATGTACTGCATGGGCTGGTTCAGACAAGCC |
| | 212 | CCCGGCAAGGAAAGAGAGGGCGTGGCCCAG |
| | | ATCAATAGCGATGGCAGCACAAGCTACGCC |
| | | GACAGCGTGAAGGGAAGGTTCACTATCTCC |
| | | AAGGACAACGCCAAGAACACTCTGTATCTG |
| | | CAGATGAACTCTCTGAAGCCAGAGGACACT |
| | | GCCATGTACTACTGCGCTGCCGATTCTAGG |
| | | GTGTACGGCGGCAGCTGGTATGAGAGGCTC |
| | | TGCGGCCCTTACACATACGAGTACAACTAC |
| | | TGGGGCCAAGGCACACAAGTGACTGTCTCG |
| | | AGCGGCGGAGGATCCCAAGTGCAGCTGCAA |
| | | GAGAGCGGAGGCGGCAGCGTGCAGACTGGA |
| | | GGCTCTCTGAGACTGAGCTGTGCTGCCAGC |
| | | GGCTACACTTATCTGAGGGGCTGTATGGGC |
| | | TGGTTTAGGCAAGCCCCCGGCAAGGAGAGA |
| | | GAGGGCGTGGCCGTCATGGATGTGGTGGGC |
| | | GATAGGAGAAGCTACATCGACAGCGTGAAG |
| | | GGAAGGTTCACAATCTCTAGGGACAATGCC |
| | | GCCAACAGCGTCTATCTGCAGATGGACAAT |
| | | CTGAAGCCAGAGGACACAGCCATGTACTAC |
| | | TGCACTGCCGGCCCTAACTGTGTGGGCTGG |
| | | AGAAGCGGACTGGATTACTGGGGCCAAGGC |
| | | ACACAAGTGACAGTCTCGTCTGCTAGCCAC |
| | | CATCACCATCACCAC |
| 311 | DNA | CAAGTGCAGCTGCAAGAGAGCGGCGGAGGA |
| | Sequence | AGCGTGCAAGCCGGAGGATCTCTGAGACTG |
| | Encoding | AGCTGCGCTGTGAGCGGCTACGCCTACTCC |
| | SEQ ID NO: | ACATACTGCATGGGCTGGTTTAGGCAAGCC |
| | 213 | CCCGGCAAAGAGAGAGAGGGCGTGGCTGCT |
| | | ATCGATAGCGGCGGCAGCACAAGCTACGCC |
| | | GATAGCGTGAAGGGAAGGTTCACAATCAGC |
| | | AAGGACAACGCCAAGAACACACTGTATCTG |
| | | AGGATGAACTCTCTGAAGCCAGAGGACACA |
| | | GCCATGTACTACTGTGCTGCTGTGCCTCCT |
| | | CCTCCAGATGGCGGCAGCTGTCTGTTTCTG |
| | | GGACCAGAGATCAAGGTCAGCAAGGCCGAT |
| | | TTTAGGTACTGGGGCCAAGGCACACAAGTG |
| | | ACAGTCTCGAGCGGCGGAGGATCCCAAGTG |
| | | CAGCTGCAAGAGAGCGGCGGAGGAAGCGTG |
| | | CAAGCTGGAGGCTCTCTGAGGCTGAGCTGT |
| | | GCTGCCAGCGGCTACACTTATAGCAGCGGC |
| | | TGTATGGGCTGGTTCAGACAAGCCCCCGGC |
| | | AAGGAAAGGGAAGCCGTGGCCGCCATCAAT |
| | | TCCGATGGCAGCACAAGCTACGCCGACAGC |
| | | GTGAAGGGAAGGTTCACAATCAGCAAGGAC |
| | | AACGCCAAGAACACACTCTATCTGCAGATG |
| | | AACTCTCTGAAGCCAGAGGACACAGCCATG |
| | | TACTACTGCGCCGCTGAGCCTTACTGTAGC |
| | | GGCGGCTACCCAAGATGGAGCGTCGCTGAG |
| | | TTCGGCTACTGGGGCCAAGGCACACAAGTG |
| | | ACTGTCTCGTCTGCTAGCCACCATCACCAT |
| | | CACCAC |
| 312 | DNA | CAAGTGCAGCTGCAAGAGAGCGGCGGAGGA |
| | Sequence | AGCGTGCAAGCCGGAGGATCTCTGAGACTG |
| | Encoding | AGCTGCGCTGTGAGCGGCTACGCCTACTCC |
| | SEQ ID NO: | ACATACTGCATGGGCTGGTTTAGGCAAGCC |
| | 214 | CCCGGCAAAGAGAGAGAGGGCGTGGCTGCT |
| | | ATCGATAGCGGCGGCAGCACAAGCTACGCC |
| | | GATAGCGTGAAGGGAAGGTTCACAATCAGC |
| | | AAGGACAACGCCAAGAACACACTGTATCTG |
| | | AGGATGAACTCTCTGAAGCCAGAGGACACA |
| | | GCCATGTACTACTGTGCTGCTGTGCCTCCT |
| | | CCTCCAGATGGCGGCAGCTGTCTGTTTCTG |
| | | GGACCAGAGATCAAGGTCAGCAAGGCCGAT |
| | | TTTAGGTACTGGGGCCAAGGCACACAAGTG |
| | | ACAGTCTCGAGCGGCGGAGGATCCCAAGTG |
| | | CAGCTGCAAGAGAGCGGAGGAGGCAGCGTC |
| | | CAAGCCGGAGGCTCTCTGAGGCTGAGCTGT |
| | | GCTGCCAGCGGCTACACTTACAGCAGCTAC |
| | | TGCATGGGCTGGTTCAGACAAGCCCCCGGC |
| | | AAGGAGAGAGAGGGCGTGGCTCACATCGAC |
| | | AGCGACGGCTCCACAAGCTACGCCGATAGC |
| | | GTGAAGGGAAGGTTCACAATCTCCAAGGAC |
| | | AACGCCAAGAACACTCTGTACCTCCAGATG |
| | | AACTCTCTGAAGCCAGAGGACACTGCCATG |
| | | TACTACTGTGCCGCCGATCCAATTCCCGGC |
| | | CCCGGCTACTGCGATGGCGGCCCTAACAAG |
| | | TACTGGGGCCAAGGCACACAAGTGACTGTC |
| | | TCGTCTGCTAGCCACCATCACCATCACCAC |
| 313 | DNA | CAAGTGCAGCTGCAAGAGAGCGGCGGAGGA |
| | Sequence | AGCGTGCAAGCCGGAGGATCTCTGAGACTG |
| | Encoding | AGCTGCGCTGTGAGCGGCTACGCCTACTCC |
| | SEQ ID NO: | ACATACTGCATGGGCTGGTTTAGGCAAGCC |
| | 215 | CCCGGCAAAGAGAGAGAGGGCGTGGCTGCT |
| | | ATCGATAGCGGCGGCAGCACAAGCTACGCC |
| | | GATAGCGTGAAGGGAAGGTTCACAATCAGC |
| | | AAGGACAACGCCAAGAACACACTGTATCTG |
| | | AGGATGAACTCTCTGAAGCCAGAGGACACA |
| | | GCCATGTACTACTGTGCTGCTGTGCCTCCT |
| | | CCTCCAGATGGCGGCAGCTGTCTGTTTCTG |
| | | GGACCAGAGATCAAGGTCAGCAAGGCCGAT |
| | | TTTAGGTACTGGGGCCAAGGCACACAAGTG |
| | | ACAGTCTCGAGCGGCGGAGGATCCCAAGTG |
| | | CAGCTGCAAGAGTCCGGAGGAGGAAGCGTG |
| | | CAAGCCGGCGGATCTCTGAGACTGAGCTGT |
| | | GCCGCCTCTAGGTACACTTACAACAGCTAC |
| | | TGCATGGGCTGGTTCAGACAAGCCCCCGGC |
| | | AAGGAAAGAGAGGGCGTGGCCACTATCGAT |
| | | AGCGACGGCATGACTAGGTACGCTGATAGC |
| | | GTCAAGGGAAGGTTCACAATCTCCAAGGAC |
| | | AATGCTAAGAACACTCTGTACCTCCAGATG |
| | | AACTCTCTGAAGCCAGAGGACACAGCCATG |
| | | TACTACTGCGCTGCCGATGCCGACTGCACT |
| | | ATCGCCGCCATGACTACTAATCCTCTGGGC |
| | | CAAGGCACACAAGTGACTGTCTCGTCTGCT |
| | | AGCCACCATCACCATCACCAC |
| 314 | DNA | CAAGTGCAGCTGCAAGAGAGCGGCGGAGGA |
| | Sequence | AGCGTGCAAGCCGGAGGATCTCTGAGACTG |
| | Encoding | AGCTGCGCTGTGAGCGGCTACGCCTACTCC |
| | SEQ ID NO: | ACATACTGCATGGGCTGGTTTAGGCAAGCC |
| | 216 | CCCGGCAAAGAGAGAGAGGGCGTGGCTGCT |
| | | ATCGATAGCGGCGGCAGCACAAGCTACGCC |
| | | GATAGCGTGAAGGGAAGGTTCACAATCAGC |
| | | AAGGACAACGCCAAGAACACACTGTATCTG |
| | | AGGATGAACTCTCTGAAGCCAGAGGACACA |
| | | GCCATGTACTACTGTGCTGCTGTGCCTCCT |
| | | CCTCCAGATGGCGGCAGCTGTCTGTTTCTG |
| | | GGACCAGAGATCAAGGTCAGCAAGGCCGAT |
| | | TTTAGGTACTGGGGCCAAGGCACACAAGTG |
| | | ACAGTCTCGAGCGGCGGAGGATCCCAAGTG |
| | | CAGCTGCAAGAGTCCGGCGGAGGCAGCGTC |
| | | CAAGCCGGAGGATCTCTGAGGCTGAGCTGT |
| | | ACAGTGAGCAGATACACTGCCAGCGTGAAC |
| | | TACATGGGCTGGTTCAGACAAGCCCCCGGC |
| | | AAAGAGAGAGAGGGCGTGGCCACAATCTTC |
| | | ACTGGCGCCGGCACAACATACTACGCCAAC |
| | | TCCGTCAAGGGAAGGTTCACAATCTCTAGG |
| | | GACAACGCCAAGAACACTGCCTATCTGCAG |
| | | ATGAACTCCCTCAAGCCAGAGGACACTGCC |
| | | ATCTACTACTGCGCCGTGGATTTCAGAGGC |
| | | GGACTGCTGTATAGGCCAGCCTACGAGTAC |
| | | ACTTATAGGGGCCAAGGCACACAAGTGACA |
| | | GTCTCGTCTGCTAGCCACCATCACCATCAC |
| | | CAC |
| 315 | DNA | CAAGTGCAGCTGCAAGAGAGCGGCGGAGGA |
| | Sequence | AGCGTGCAAGCCGGAGGATCTCTGAGACTG |
| | Encoding | AGCTGCGCTGTGAGCGGCTACGCCTACTCC |
| | SEQ ID NO: | ACATACTGCATGGGCTGGTTTAGGCAAGCC |
| | 217 | CCCGGCAAAGAGAGAGAGGGCGTGGCTGCT |
| | | ATCGATAGCGGCGGCAGCACAAGCTACGCC |
| | | GATAGCGTGAAGGGAAGGTTCACAATCAGC |
| | | AAGGACAACGCCAAGAACACACTGTATCTG |
| | | AGGATGAACTCTCTGAAGCCAGAGGACACA |
| | | GCCATGTACTACTGTGCTGCTGTGCCTCCT |
| | | CCTCCAGATGGCGGCAGCTGTCTGTTTCTG |
| | | GGACCAGAGATCAAGGTCAGCAAGGCCGAT |
| | | TTTAGGTACTGGGGCCAAGGCACACAAGTG |
| | | ACAGTCTCGAGCGGCGGAGGATCCCAAGTG |
| | | CAGCTGCAAGAGAGCGGAGGAGGCAGCGTC |
| | | GAAGCTGGAGGATCTCTGAGGCTGAGCTGT |
| | | GCTGCCAGCGGCTACACTCACAGCAGCTAC |
| | | TGTATGGGCTGGTTCAGACAAGCCCCCGGC |
| | | AAGGAGAGGGAAGGCGTGGCTGCCATCGAC |
| | | GTGGATGGCAGCACTACTTACGCCGACAGC |
| | | GTGAAGGGAAGGTTCACTATCAGCAAGGAC |
| | | AACGCCAAGAACACACTCTATCTGCAGATG |
| | | AACAGCCTCAAGCCAGAGGACACTGGCATG |
| | | TACTACTGCGCCGCCGAGTTCGCCGATTGC |
| | | AGCAGCAACTACTTTCTGCCTCCCGGCGCC |
| | | GTCAGATATTGGGGCCAAGGCACTCAAGTG |
| | | ACAGTCTCGTCTGCTAGCCACCATCACCAT |
| | | CACCAC |
| 316 | DNA | CAAGTGCAGCTGCAAGAGAGCGGCGGAGGA |
| | Sequence | AGCGTGCAAGCCGGAGGATCTCTGAGACTG |
| | Encoding | AGCTGCGCTGTGAGCGGCTACGCCTACTCC |
| | SEQ ID NO: | ACATACTGCATGGGCTGGTTTAGGCAAGCC |
| | 218 | CCCGGCAAAGAGAGAGAGGGCGTGGCTGCT |
| | | ATCGATAGCGGCGGCAGCACAAGCTACGCC |
| | | GATAGCGTGAAGGGAAGGTTCACAATCAGC |
| | | AAGGACAACGCCAAGAACACACTGTATCTG |
| | | AGGATGAACTCTCTGAAGCCAGAGGACACA |
| | | GCCATGTACTACTGTGCTGCTGTGCCTCCT |
| | | CCTCCAGATGGCGGCAGCTGTCTGTTTCTG |
| | | GGACCAGAGATCAAGGTCAGCAAGGCCGAT |
| | | TTTAGGTACTGGGGCCAAGGCACACAAGTG |
| | | ACAGTCTCGAGCGGCGGAGGATCCCAAGTG |
| | | CAGCTGCAAGAGAGCGGAGGAGGAAGCGTC |
| | | CAAGCCGGAGGATCTCTGAGACTGAGCTGC |
| | | GCCGCTAGTGGCTACTCCTACAGCAGCTAC |
| | | TGCATGGGCTGGTTTAGGCAAGCCCCCGGC |
| | | AAGGAGAGAGAAGGCGTGGCCACTATCGAC |
| | | AGCGACGGCATGACAAGGTACGCCGACAGC |
| | | GTGAAGGGAAGGTTCACAATCAGCAAGGAC |
| | | AACGCCAAGAACACACTGTATCTGCAGATG |
| | | AACTCTCTGAAGCCAGAGGACACTGCCATG |
| | | TACTACTGTGCCGCTCCTCTGTACGACTGT |
| | | GATAGCGGCGCTGTGGGCAGAAATCCACCT |
| | | TATTGGGGCCAAGGCACTCAAGTGACAGTC |
| | | TCGTCTGCTAGCCACCATCACCATCACCAC |
| 317 | DNA | CAAGTGCAGCTGCAAGAGAGCGGCGGAGGA |
| | Sequence | AGCGTGCAAGCCGGAGGATCTCTGAGACTG |
| | Encoding | AGCTGCGCTGTGAGCGGCTACGCCTACTCC |
| | SEQ ID NO: | ACATACTGCATGGGCTGGTTTAGGCAAGCC |
| | 219 | CCCGGCAAAGAGAGAGAGGGCGTGGCTGCT |
| | | ATCGATAGCGGCGGCAGCACAAGCTACGCC |
| | | GATAGCGTGAAGGGAAGGTTCACAATCAGC |
| | | AAGGACAACGCCAAGAACACACTGTATCTG |
| | | AGGATGAACTCTCTGAAGCCAGAGGACACA |
| | | GCCATGTACTACTGTGCTGCTGTGCCTCCT |
| | | CCTCCAGATGGCGGCAGCTGTCTGTTTCTG |
| | | GGACCAGAGATCAAGGTCAGCAAGGCCGAT |
| | | TTTAGGTACTGGGGCCAAGGCACACAAGTG |
| | | ACAGTCTCGAGCGGCGGAGGATCCCAAGTG |
| | | CAGCTGCAAGAGAGCGGAGGCGGCAGCGTG |
| | | CAGACTGGAGGCTCTCTGAGACTGAGCTGT |
| | | GCTGCCAGCGGCTACACTTATCTGAGGGGC |
| | | TGTATGGGCTGGTTTAGGCAAGCCCCCGGC |
| | | AAGGAGAGAGAGGGCGTGGCCGTCATGGAT |
| | | GTGGTGGGCGATAGGAGAAGCTACATCGAC |
| | | AGCGTGAAGGGAAGGTTCACAATCTCTAGG |
| | | GACAATGCCGCCAACAGCGTCTATCTGCAG |
| | | ATGGACAATCTGAAGCCAGAGGACACAGCC |
| | | ATGTACTACTGCACTGCCGGCCCTAACTGT |
| | | GTGGGCTGGAGAAGCGGACTGGATTACTGG |
| | | GGCCAAGGCACACAAGTGACAGTCTCGTCT |
| | | GCTAGCCACCATCACCATCACCAC |
| 318 | DNA | CAAGTGCAGCTGCAAGAGAGCGGAGGAGGA |
| | Sequence | AGCGTGCAAGCCGGAGGCTCTCTGAGGCTG |
| | Encoding | AGCTGTACAGTGTCCGGCTACACTTACAGC |
| | SEQ ID NO: | TCCAATTGCATGGGCTGGTTTAGGCAAGCC |
| | 220 | CCCGGCAAGGAAAGAGAGGGCGTGGCCACT |
| | | ATCTACACTGGCGGCGGCAACACATACTAC |
| | | GCCGATAGCGTGAAGGGAAGGTTCACTATC |
| | | AGCCAAGATAACGCCAAGAACACAGTGTAT |
| | | CTGCAGATGAACAATCTGAAGCCAGAGGAC |
| | | ACTGCCATGTACTACTGTGCTGCTGAGCCA |
| | | CTGTCTAGGGTGTACGGCGGCAGCTGCCCA |
| | | ACTCCTACATTCGACTACTGGGGCCAAGGC |
| | | ACACAAGTGACTGTCTCGAGCGGCGGAGGA |
| | | TCCCAAGTGCAGCTGCAAGAGAGCGGCGGA |
| | | GGAAGCGTGCAAGCTGGAGGCTCTCTGAGG |
| | | CTGAGCTGTGCTGCCAGCGGCTACACTTAT |
| | | AGCAGCGGCTGTATGGGCTGGTTCAGACAA |
| | | GCCCCCGGCAAGGAAAGGGAAGCCGTGGCC |
| | | GCCATCAATTCCGATGGCAGCACAAGCTAC |
| | | GCCGACAGCGTGAAGGGAAGGTTCACAATC |
| | | AGCAAGGACAACGCCAAGAACACACTCTAT |
| | | CTGCAGATGAACTCTCTGAAGCCAGAGGAC |
| | | ACAGCCATGTACTACTGCGCCGCTGAGCCT |
| | | TACTGTAGCGGCGGCTACCCAAGATGGAGC |
| | | GTCGCTGAGTTCGGCTACTGGGGCCAAGGC |
| | | ACACAAGTGACTGTCTCGTCTGCTAGCCAC |
| | | CATCACCATCACCAC |
| 319 | DNA | CAAGTGCAGCTGCAAGAGAGCGGAGGAGGA |
| | Sequence | AGCGTGCAAGCCGGAGGCTCTCTGAGGCTG |
| | Encoding | AGCTGTACAGTGTCCGGCTACACTTACAGC |
| | SEQ ID NO: | TCCAATTGCATGGGCTGGTTTAGGCAAGCC |
| | 221 | CCCGGCAAGGAAAGAGAGGGCGTGGCCACT |
| | | ATCTACACTGGCGGCGGCAACACATACTAC |
| | | GCCGATAGCGTGAAGGGAAGGTTCACTATC |
| | | AGCCAAGATAACGCCAAGAACACAGTGTAT |
| | | CTGCAGATGAACAATCTGAAGCCAGAGGAC |
| | | ACTGCCATGTACTACTGTGCTGCTGAGCCA |
| | | CTGTCTAGGGTGTACGGCGGCAGCTGCCCA |
| | | ACTCCTACATTCGACTACTGGGGCCAAGGC |
| | | ACACAAGTGACTGTCTCGAGCGGCGGAGGA |
| | | TCCCAAGTGCAGCTGCAAGAGAGCGGAGGA |
| | | GGCAGCGTCCAAGCCGGAGGCTCTCTGAGG |
| | | CTGAGCTGTGCTGCCAGCGGCTACACTTAC |
| | | AGCAGCTACTGCATGGGCTGGTTCAGACAA |
| | | GCCCCCGGCAAGGAGAGAGAGGGCGTGGCT |
| | | CACATCGACAGCGACGGCTCCACAAGCTAC |
| | | GCCGATAGCGTGAAGGGAAGGTTCACAATC |
| | | TCCAAGGACAACGCCAAGAACACTCTGTAC |
| | | CTCCAGATGAACTCTCTGAAGCCAGAGGAC |
| | | ACTGCCATGTACTACTGTGCCGCCGATCCA |
| | | ATTCCCGGCCCCGGCTACTGCGATGGCGGC |
| | | CCTAACAAGTACTGGGGCCAAGGCACACAA |
| | | GTGACTGTCTCGTCTGCTAGCCACCATCAC |
| | | CATCACCAC |
| 320 | DNA | CAAGTGCAGCTGCAAGAGAGCGGAGGAGGA |
| | Sequence | AGCGTGCAAGCCGGAGGCTCTCTGAGGCTG |
| | Encoding | AGCTGTACAGTGTCCGGCTACACTTACAGC |
| | SEQ ID NO: | TCCAATTGCATGGGCTGGTTTAGGCAAGCC |
| | 222 | CCCGGCAAGGAAAGAGAGGGCGTGGCCACT |
| | | ATCTACACTGGCGGCGGCAACACATACTAC |
| | | GCCGATAGCGTGAAGGGAAGGTTCACTATC |
| | | AGCCAAGATAACGCCAAGAACACAGTGTAT |
| | | CTGCAGATGAACAATCTGAAGCCAGAGGAC |
| | | ACTGCCATGTACTACTGTGCTGCTGAGCCA |
| | | CTGTCTAGGGTGTACGGCGGCAGCTGCCCA |
| | | ACTCCTACATTCGACTACTGGGGCCAAGGC |
| | | ACACAAGTGACTGTCTCGAGCGGCGGAGGA |
| | | TCCCAAGTGCAGCTGCAAGAGTCCGGAGGA |
| | | GGAAGCGTGCAAGCCGGCGGATCTCTGAGA |
| | | CTGAGCTGTGCCGCCTCTAGGTACACTTAC |
| | | AACAGCTACTGCATGGGCTGGTTCAGACAA |
| | | GCCCCCGGCAAGGAAAGAGAGGGCGTGGCC |
| | | ACTATCGATAGCGACGGCATGACTAGGTAC |
| | | GCTGATAGCGTCAAGGGAAGGTTCACAATC |
| | | TCCAAGGACAATGCTAAGAACACTCTGTAC |
| | | CTCCAGATGAACTCTCTGAAGCCAGAGGAC |
| | | ACAGCCATGTACTACTGCGCTGCCGATGCC |
| | | GACTGCACTATCGCCGCCATGACTACTAAT |
| | | CCTCTGGGCCAAGGCACACAAGTGACTGTC |
| | | TCGTCTGCTAGCCACCATCACCATCACCAC |
| 321 | DNA | CAAGTGCAGCTGCAAGAGAGCGGAGGAGGA |
| | Sequence | AGCGTGCAAGCCGGAGGCTCTCTGAGGCTG |
| | Encoding | AGCTGTACAGTGTCCGGCTACACTTACAGC |
| | SEQ ID NO: | TCCAATTGCATGGGCTGGTTTAGGCAAGCC |
| | 223 | CCCGGCAAGGAAAGAGAGGGCGTGGCCACT |
| | | ATCTACACTGGCGGCGGCAACACATACTAC |
| | | GCCGATAGCGTGAAGGGAAGGTTCACTATC |
| | | AGCCAAGATAACGCCAAGAACACAGTGTAT |
| | | CTGCAGATGAACAATCTGAAGCCAGAGGAC |
| | | ACTGCCATGTACTACTGTGCTGCTGAGCCA |
| | | CTGTCTAGGGTGTACGGCGGCAGCTGCCCA |
| | | ACTCCTACATTCGACTACTGGGGCCAAGGC |
| | | ACACAAGTGACTGTCTCGAGCGGCGGAGGA |
| | | TCCCAAGTGCAGCTGCAAGAGTCCGGCGGA |
| | | GGCAGCGTCCAAGCCGGAGGATCTCTGAGG |
| | | CTGAGCTGTACAGTGAGCAGATACACTGCC |
| | | AGCGTGAACTACATGGGCTGGTTCAGACAA |
| | | GCCCCCGGCAAAGAGAGAGAGGGCGTGGCC |
| | | ACAATCTTCACTGGCGCCGGCACAACATAC |
| | | TACGCCAACTCCGTCAAGGGAAGGTTCACA |
| | | ATCTCTAGGGACAACGCCAAGAACACTGCC |
| | | TATCTGCAGATGAACTCCCTCAAGCCAGAG |
| | | GACACTGCCATCTACTACTGCGCCGTGGAT |
| | | TTCAGAGGCGGACTGCTGTATAGGCCAGCC |
| | | TACGAGTACACTTATAGGGGCCAAGGCACA |
| | | CAAGTGACAGTCTCGTCTGCTAGCCACCAT |
| | | CACCATCACCAC |
| 322 | DNA | CAAGTGCAGCTGCAAGAGAGCGGAGGAGGA |
| | Sequence | AGCGTGCAAGCCGGAGGCTCTCTGAGGCTG |
| | Encoding | AGCTGTACAGTGTCCGGCTACACTTACAGC |
| | SEQ ID NO: | TCCAATTGCATGGGCTGGTTTAGGCAAGCC |
| | 224 | CCCGGCAAGGAAAGAGAGGGCGTGGCCACT |
| | | ATCTACACTGGCGGCGGCAACACATACTAC |
| | | GCCGATAGCGTGAAGGGAAGGTTCACTATC |
| | | AGCCAAGATAACGCCAAGAACACAGTGTAT |
| | | CTGCAGATGAACAATCTGAAGCCAGAGGAC |
| | | ACTGCCATGTACTACTGTGCTGCTGAGCCA |
| | | CTGTCTAGGGTGTACGGCGGCAGCTGCCCA |
| | | ACTCCTACATTCGACTACTGGGGCCAAGGC |
| | | ACACAAGTGACTGTCTCGAGCGGCGGAGGA |
| | | TCCCAAGTGCAGCTGCAAGAGAGCGGAGGA |
| | | GGCAGCGTCGAAGCTGGAGGATCTCTGAGG |
| | | CTGAGCTGTGCTGCCAGCGGCTACACTCAC |
| | | AGCAGCTACTGTATGGGCTGGTTCAGACAA |
| | | GCCCCCGGCAAGGAGAGGGAAGGCGTGGCT |
| | | GCCATCGACGTGGATGGCAGCACTACTTAC |
| | | GCCGACAGCGTGAAGGGAAGGTTCACTATC |
| | | AGCAAGGACAACGCCAAGAACACACTCTAT |
| | | CTGCAGATGAACAGCCTCAAGCCAGAGGAC |
| | | ACTGGCATGTACTACTGCGCCGCCGAGTTC |
| | | GCCGATTGCAGCAGCAACTACTTTCTGCCT |
| | | CCCGGCGCCGTCAGATATTGGGGCCAAGGC |
| | | ACTCAAGTGACAGTCTCGTCTGCTAGCCAC |
| | | CATCACCATCACCAC |
| 323 | DNA | CAAGTGCAGCTGCAAGAGAGCGGAGGAGGA |
| | Sequence | AGCGTGCAAGCCGGAGGCTCTCTGAGGCTG |
| | Encoding | AGCTGTACAGTGTCCGGCTACACTTACAGC |
| | SEQ ID NO: | TCCAATTGCATGGGCTGGTTTAGGCAAGCC |
| | 225 | CCCGGCAAGGAAAGAGAGGGCGTGGCCACT |
| | | ATCTACACTGGCGGCGGCAACACATACTAC |
| | | GCCGATAGCGTGAAGGGAAGGTTCACTATC |
| | | AGCCAAGATAACGCCAAGAACACAGTGTAT |
| | | CTGCAGATGAACAATCTGAAGCCAGAGGAC |
| | | ACTGCCATGTACTACTGTGCTGCTGAGCCA |
| | | CTGTCTAGGGTGTACGGCGGCAGCTGCCCA |
| | | ACTCCTACATTCGACTACTGGGGCCAAGGC |
| | | ACACAAGTGACTGTCTCGAGCGGCGGAGGA |
| | | TCCCAAGTGCAGCTGCAAGAGAGCGGAGGA |
| | | GGAAGCGTCCAAGCCGGAGGATCTCTGAGA |
| | | CTGAGCTGCGCCGCTAGTGGCTACTCCTAC |
| | | AGCAGCTACTGCATGGGCTGGTTTAGGCAA |
| | | GCCCCCGGCAAGGAGAGAGAAGGCGTGGCC |
| | | ACTATCGACAGCGACGGCATGACAAGGTAC |
| | | GCCGACAGCGTGAAGGGAAGGTTCACAATC |
| | | AGCAAGGACAACGCCAAGAACACACTGTAT |
| | | CTGCAGATGAACTCTCTGAAGCCAGAGGAC |
| | | ACTGCCATGTACTACTGTGCCGCTCCTCTG |
| | | TACGACTGTGATAGCGGCGCTGTGGGCAGA |
| | | AATCCACCTTATTGGGGCCAAGGCACTCAA |
| | | GTGACAGTCTCGTCTGCTAGCCACCATCAC |
| | | CATCACCAC |
| 324 | DNA | CAAGTGCAGCTGCAAGAGAGCGGAGGAGGA |
| | Sequence | AGCGTGCAAGCCGGAGGCTCTCTGAGGCTG |
| | Encoding | AGCTGTACAGTGTCCGGCTACACTTACAGC |
| | SEQ ID NO: | TCCAATTGCATGGGCTGGTTTAGGCAAGCC |
| | 226 | CCCGGCAAGGAAAGAGAGGGCGTGGCCACT |
| | | ATCTACACTGGCGGCGGCAACACATACTAC |
| | | GCCGATAGCGTGAAGGGAAGGTTCACTATC |
| | | AGCCAAGATAACGCCAAGAACACAGTGTAT |
| | | CTGCAGATGAACAATCTGAAGCCAGAGGAC |
| | | ACTGCCATGTACTACTGTGCTGCTGAGCCA |
| | | CTGTCTAGGGTGTACGGCGGCAGCTGCCCA |
| | | ACTCCTACATTCGACTACTGGGGCCAAGGC |
| | | ACACAAGTGACTGTCTCGAGCGGCGGAGGA |
| | | TCCCAAGTGCAGCTGCAAGAGAGCGGAGGC |
| | | GGCAGCGTGCAGACTGGAGGCTCTCTGAGA |
| | | CTGAGCTGTGCTGCCAGCGGCTACACTTAT |
| | | CTGAGGGGCTGTATGGGCTGGTTTAGGCAA |
| | | GCCCCCGGCAAGGAGAGAGAGGGCGTGGCC |
| | | GTCATGGATGTGGTGGGCGATAGGAGAAGC |
| | | TACATCGACAGCGTGAAGGGAAGGTTCACA |
| | | ATCTCTAGGGACAATGCCGCCAACAGCGTC |
| | | TATCTGCAGATGGACAATCTGAAGCCAGAG |
| | | GACACAGCCATGTACTACTGCACTGCCGGC |
| | | CCTAACTGTGTGGGCTGGAGAAGCGGACTG |
| | | GATTACTGGGGCCAAGGCACACAAGTGACA |
| | | GTCTCGTCTGCTAGCCACCATCACCATCAC |
| | | CAC |
| 325 | DNA | CAAGTGCAGCTGCAAGAGAGCGGAGGAGGA |
| | Sequence | AGCGTCCAAGCCGGAGGCTCTCTGAGGCTG |
| | Encoding | AGCTGTGGAGCCAGCGGCTACACTTACAGC |
| | SEQ ID NO: | AGCTACTGTATGGGCTGGTTTAGGCAAGTG |
| | 227 | CCCGGCAAGGAGAGAGAGGGCGTGGCCGTG |
| | | ATCGATTCCGATGGCAGCACAAGCTACGCT |
| | | GACAGCGTGAAGGGAAGGTTCACAATCAGC |
| | | AAGGACAACGGCAAGAACACACTCTATCTG |
| | | CAGATGAACAGCCTCAAGCCAGAGGACACA |
| | | GCCATGTACTACTGCGCCGCTGATCTGGGC |
| | | CACTATAGGCCTCCTTGTGGCGTGCTGTAT |
| | | CTGGGCATGGATTACTGGGGCAAGGGCACA |
| | | CAAGTGACAGTCTCGAGCGGCGGAGGATCC |
| | | CAAGTGCAGCTGCAAGAGAGCGGCGGAGGA |
| | | AGCGTGCAAGCTGGAGGCTCTCTGAGGCTG |
| | | AGCTGTGCTGCCAGCGGCTACACTTATAGC |
| | | AGCGGCTGTATGGGCTGGTTCAGACAAGCC |
| | | CCCGGCAAGGAAAGGGAAGCCGTGGCCGCC |
| | | ATCAATTCCGATGGCAGCACAAGCTACGCC |
| | | GACAGCGTGAAGGGAAGGTTCACAATCAGC |
| | | AAGGACAACGCCAAGAACACACTCTATCTG |
| | | CAGATGAACTCTCTGAAGCCAGAGGACACA |
| | | GCCATGTACTACTGCGCCGCTGAGCCTTAC |
| | | TGTAGCGGCGGCTACCCAAGATGGAGCGTC |
| | | GCTGAGTTCGGCTACTGGGGCCAAGGCACA |
| | | CAAGTGACTGTCTCGTCTGCTAGCCACCAT |
| | | CACCATCACCAC |
| 326 | DNA | CAAGTGCAGCTGCAAGAGAGCGGAGGAGGA |
| | Sequence | AGCGTCCAAGCCGGAGGCTCTCTGAGGCTG |
| | Encoding | AGCTGTGGAGCCAGCGGCTACACTTACAGC |
| | SEQ ID NO: | AGCTACTGTATGGGCTGGTTTAGGCAAGTG |
| | 228 | CCCGGCAAGGAGAGAGAGGGCGTGGCCGTG |
| | | ATCGATTCCGATGGCAGCACAAGCTACGCT |
| | | GACAGCGTGAAGGGAAGGTTCACAATCAGC |
| | | AAGGACAACGGCAAGAACACACTCTATCTG |
| | | CAGATGAACAGCCTCAAGCCAGAGGACACA |
| | | GCCATGTACTACTGCGCCGCTGATCTGGGC |
| | | CACTATAGGCCTCCTTGTGGCGTGCTGTAT |
| | | CTGGGCATGGATTACTGGGGCAAGGGCACA |
| | | CAAGTGACAGTCTCGAGCGGCGGAGGATCC |
| | | CAAGTGCAGCTGCAAGAGAGCGGAGGAGGC |
| | | AGCGTCCAAGCCGGAGGCTCTCTGAGGCTG |
| | | AGCTGTGCTGCCAGCGGCTACACTTACAGC |
| | | AGCTACTGCATGGGCTGGTTCAGACAAGCC |
| | | CCCGGCAAGGAGAGAGAGGGCGTGGCTCAC |
| | | ATCGACAGCGACGGCTCCACAAGCTACGCC |
| | | GATAGCGTGAAGGGAAGGTTCACAATCTCC |
| | | AAGGACAACGCCAAGAACACTCTGTACCTC |
| | | CAGATGAACTCTCTGAAGCCAGAGGACACT |
| | | GCCATGTACTACTGTGCCGCCGATCCAATT |
| | | CCCGGCCCCGGCTACTGCGATGGCGGCCCT |
| | | AACAAGTACTGGGGCCAAGGCACACAAGTG |
| | | ACTGTCTCGTCTGCTAGCCACCATCACCAT |
| | | CACCAC |
| 327 | DNA | CAAGTGCAGCTGCAAGAGAGCGGAGGAGGA |
| | Sequence | AGCGTCCAAGCCGGAGGCTCTCTGAGGCTG |
| | Encoding | AGCTGTGGAGCCAGCGGCTACACTTACAGC |
| | SEQ ID NO: | AGCTACTGTATGGGCTGGTTTAGGCAAGTG |
| | 229 | CCCGGCAAGGAGAGAGAGGGCGTGGCCGTG |
| | | ATCGATTCCGATGGCAGCACAAGCTACGCT |
| | | GACAGCGTGAAGGGAAGGTTCACAATCAGC |
| | | AAGGACAACGGCAAGAACACACTCTATCTG |
| | | CAGATGAACAGCCTCAAGCCAGAGGACACA |
| | | GCCATGTACTACTGCGCCGCTGATCTGGGC |
| | | CACTATAGGCCTCCTTGTGGCGTGCTGTAT |
| | | CTGGGCATGGATTACTGGGGCAAGGGCACA |
| | | CAAGTGACAGTCTCGAGCGGCGGAGGATCC |
| | | CAAGTGCAGCTGCAAGAGTCCGGAGGAGGA |
| | | AGCGTGCAAGCCGGCGGATCTCTGAGACTG |
| | | AGCTGTGCCGCCTCTAGGTACACTTACAAC |
| | | AGCTACTGCATGGGCTGGTTCAGACAAGCC |
| | | CCCGGCAAGGAAAGAGAGGGCGTGGCCACT |
| | | ATCGATAGCGACGGCATGACTAGGTACGCT |
| | | GATAGCGTCAAGGGAAGGTTCACAATCTCC |
| | | AAGGACAATGCTAAGAACACTCTGTACCTC |
| | | CAGATGAACTCTCTGAAGCCAGAGGACACA |
| | | GCCATGTACTACTGCGCTGCCGATGCCGAC |
| | | TGCACTATCGCCGCCATGACTACTAATCCT |
| | | CTGGGCCAAGGCACACAAGTGACTGTCTCG |
| | | TCTGCTAGCCACCATCACCATCACCAC |
| 328 | DNA | CAAGTGCAGCTGCAAGAGAGCGGAGGAGGA |
| | Sequence | AGCGTCCAAGCCGGAGGCTCTCTGAGGCTG |
| | Encoding | AGCTGTGGAGCCAGCGGCTACACTTACAGC |
| | SEQ ID NO: | AGCTACTGTATGGGCTGGTTTAGGCAAGTG |
| | 230 | CCCGGCAAGGAGAGAGAGGGCGTGGCCGTG |
| | | ATCGATTCCGATGGCAGCACAAGCTACGCT |
| | | GACAGCGTGAAGGGAAGGTTCACAATCAGC |
| | | AAGGACAACGGCAAGAACACACTCTATCTG |
| | | CAGATGAACAGCCTCAAGCCAGAGGACACA |
| | | GCCATGTACTACTGCGCCGCTGATCTGGGC |
| | | CACTATAGGCCTCCTTGTGGCGTGCTGTAT |
| | | CTGGGCATGGATTACTGGGGCAAGGGCACA |
| | | CAAGTGACAGTCTCGAGCGGCGGAGGATCC |
| | | CAAGTGCAGCTGCAAGAGTCCGGCGGAGGC |
| | | AGCGTCCAAGCCGGAGGATCTCTGAGGCTG |
| | | AGCTGTACAGTGAGCAGATACACTGCCAGC |
| | | GTGAACTACATGGGCTGGTTCAGACAAGCC |
| | | CCCGGCAAAGAGAGAGAGGGCGTGGCCACA |
| | | ATCTTCACTGGCGCCGGCACAACATACTAC |
| | | GCCAACTCCGTCAAGGGAAGGTTCACAATC |
| | | TCTAGGGACAACGCCAAGAACACTGCCTAT |
| | | CTGCAGATGAACTCCCTCAAGCCAGAGGAC |
| | | ACTGCCATCTACTACTGCGCCGTGGATTTC |
| | | AGAGGCGGACTGCTGTATAGGCCAGCCTAC |
| | | GAGTACACTTATAGGGGCCAAGGCACACAA |
| | | GTGACAGTCTCGTCTGCTAGCCACCATCAC |
| | | CATCACCAC |
| 329 | DNA | CAAGTGCAGCTGCAAGAGAGCGGAGGAGGA |
| | Sequence | AGCGTCCAAGCCGGAGGCTCTCTGAGGCTG |
| | Encoding | AGCTGTGGAGCCAGCGGCTACACTTACAGC |
| | SEQ ID NO: | AGCTACTGTATGGGCTGGTTTAGGCAAGTG |
| | 231 | CCCGGCAAGGAGAGAGAGGGCGTGGCCGTG |
| | | ATCGATTCCGATGGCAGCACAAGCTACGCT |
| | | GACAGCGTGAAGGGAAGGTTCACAATCAGC |
| | | AAGGACAACGGCAAGAACACACTCTATCTG |
| | | CAGATGAACAGCCTCAAGCCAGAGGACACA |
| | | GCCATGTACTACTGCGCCGCTGATCTGGGC |
| | | CACTATAGGCCTCCTTGTGGCGTGCTGTAT |
| | | CTGGGCATGGATTACTGGGGCAAGGGCACA |
| | | CAAGTGACAGTCTCGAGCGGCGGAGGATCC |
| | | CAAGTGCAGCTGCAAGAGAGCGGAGGAGGC |
| | | AGCGTCGAAGCTGGAGGATCTCTGAGGCTG |
| | | AGCTGTGCTGCCAGCGGCTACACTCACAGC |
| | | AGCTACTGTATGGGCTGGTTCAGACAAGCC |
| | | CCCGGCAAGGAGAGGGAAGGCGTGGCTGCC |
| | | ATCGACGTGGATGGCAGCACTACTTACGCC |
| | | GACAGCGTGAAGGGAAGGTTCACTATCAGC |
| | | AAGGACAACGCCAAGAACACACTCTATCTG |
| | | CAGATGAACAGCCTCAAGCCAGAGGACACT |
| | | GGCATGTACTACTGCGCCGCCGAGTTCGCC |
| | | GATTGCAGCAGCAACTACTTTCTGCCTCCC |
| | | GGCGCCGTCAGATATTGGGGCCAAGGCACT |
| | | CAAGTGACAGTCTCGTCTGCTAGCCACCAT |
| | | CACCATCACCAC |
| 330 | DNA | CAAGTGCAGCTGCAAGAGAGCGGAGGAGGA |
| | Sequence | AGCGTCCAAGCCGGAGGCTCTCTGAGGCTG |
| | Encoding | AGCTGTGGAGCCAGCGGCTACACTTACAGC |
| | SEQ ID NO: | AGCTACTGTATGGGCTGGTTTAGGCAAGTG |
| | 232 | CCCGGCAAGGAGAGAGAGGGCGTGGCCGTG |
| | | ATCGATTCCGATGGCAGCACAAGCTACGCT |
| | | GACAGCGTGAAGGGAAGGTTCACAATCAGC |
| | | AAGGACAACGGCAAGAACACACTCTATCTG |
| | | CAGATGAACAGCCTCAAGCCAGAGGACACA |
| | | GCCATGTACTACTGCGCCGCTGATCTGGGC |
| | | CACTATAGGCCTCCTTGTGGCGTGCTGTAT |
| | | CTGGGCATGGATTACTGGGGCAAGGGCACA |
| | | CAAGTGACAGTCTCGAGCGGCGGAGGATCC |
| | | CAAGTGCAGCTGCAAGAGAGCGGAGGAGGA |
| | | AGCGTCCAAGCCGGAGGATCTCTGAGACTG |
| | | AGCTGCGCCGCTAGTGGCTACTCCTACAGC |
| | | AGCTACTGCATGGGCTGGTTTAGGCAAGCC |
| | | CCCGGCAAGGAGAGAGAAGGCGTGGCCACT |
| | | ATCGACAGCGACGGCATGACAAGGTACGCC |
| | | GACAGCGTGAAGGGAAGGTTCACAATCAGC |
| | | AAGGACAACGCCAAGAACACACTGTATCTG |
| | | CAGATGAACTCTCTGAAGCCAGAGGACACT |
| | | GCCATGTACTACTGTGCCGCTCCTCTGTAC |
| | | GACTGTGATAGCGGCGCTGTGGGCAGAAAT |
| | | CCACCTTATTGGGGCCAAGGCACTCAAGTG |
| | | ACAGTCTCGTCTGCTAGCCACCATCACCAT |
| | | CACCAC |
| 331 | DNA | CAAGTGCAGCTGCAAGAGAGCGGAGGAGGA |
| | Sequence | AGCGTCCAAGCCGGAGGCTCTCTGAGGCTG |
| | Encoding | AGCTGTGGAGCCAGCGGCTACACTTACAGC |
| | SEQ ID NO: | AGCTACTGTATGGGCTGGTTTAGGCAAGTG |
| | 233 | CCCGGCAAGGAGAGAGAGGGCGTGGCCGTG |
| | | ATCGATTCCGATGGCAGCACAAGCTACGCT |
| | | GACAGCGTGAAGGGAAGGTTCACAATCAGC |
| | | AAGGACAACGGCAAGAACACACTCTATCTG |
| | | CAGATGAACAGCCTCAAGCCAGAGGACACA |
| | | GCCATGTACTACTGCGCCGCTGATCTGGGC |
| | | CACTATAGGCCTCCTTGTGGCGTGCTGTAT |
| | | CTGGGCATGGATTACTGGGGCAAGGGCACA |
| | | CAAGTGACAGTCTCGAGCGGCGGAGGATCC |
| | | CAAGTGCAGCTGCAAGAGAGCGGAGGCGGC |
| | | AGCGTGCAGACTGGAGGCTCTCTGAGACTG |
| | | AGCTGTGCTGCCAGCGGCTACACTTATCTG |
| | | AGGGGCTGTATGGGCTGGTTTAGGCAAGCC |
| | | CCCGGCAAGGAGAGAGAGGGCGTGGCCGTC |
| | | ATGGATGTGGTGGGCGATAGGAGAAGCTAC |
| | | ATCGACAGCGTGAAGGGAAGGTTCACAATC |
| | | TCTAGGGACAATGCCGCCAACAGCGTCTAT |
| | | CTGCAGATGGACAATCTGAAGCCAGAGGAC |
| | | ACAGCCATGTACTACTGCACTGCCGGCCCT |
| | | AACTGTGTGGGCTGGAGAAGCGGACTGGAT |
| | | TACTGGGGCCAAGGCACACAAGTGACAGTC |
| | | TCGTCTGCTAGCCACCATCACCATCACCAC |
| 332 | DNA | CAAGTGCAGCTGCAAGAGAGCGGAGGAGGA |
| | Sequence | AGCGTCCAAGCCGGAGGCTCTCTGAGACTG |
| | Encoding | AGCTGTGCCGCCAGCGGCTACTCCAACTGC |
| | SEQ ID NO: | AGCTACGACATGACTTGGTATAGGCAAGCC |
| | 234 | CCCGGCAAGGAGAGGGAGTTCGTGTCCGCC |
| | | ATCCACAGCGACGGCAGCACTAGATACGCC |
| | | GACAGCGTGAAGGGAAGGTTCTTCATCAGC |
| | | CAAGATAACGCCAAGAACACAGTGTATCTG |
| | | CAGATGAACTCCCTCAAGCCAGAGGACACT |
| | | GCCATGTACTACTGCAAGACAGACCCACTG |
| | | CACTGCAGAGCCCATGGCGGCAGCTGGTAT |
| | | AGCGTGAGGGCCAACTACTGGGGCCAAGGC |
| | | ACACAAGTGACAGTCTCGAGCGGCGGAGGA |
| | | TCCCAAGTGCAGCTGCAAGAGAGCGGCGGA |
| | | GGAAGCGTGCAAGCTGGAGGCTCTCTGAGG |
| | | CTGAGCTGTGCTGCCAGCGGCTACACTTAT |
| | | AGCAGCGGCTGTATGGGCTGGTTCAGACAA |
| | | GCCCCCGGCAAGGAAAGGGAAGCCGTGGCC |
| | | GCCATCAATTCCGATGGCAGCACAAGCTAC |
| | | GCCGACAGCGTGAAGGGAAGGTTCACAATC |
| | | AGCAAGGACAACGCCAAGAACACACTCTAT |
| | | CTGCAGATGAACTCTCTGAAGCCAGAGGAC |
| | | ACAGCCATGTACTACTGCGCCGCTGAGCCT |
| | | TACTGTAGCGGCGGCTACCCAAGATGGAGC |
| | | GTCGCTGAGTTCGGCTACTGGGGCCAAGGC |
| | | ACACAAGTGACTGTCTCGTCTGCTAGCCAC |
| | | CATCACCATCACCAC |
| 333 | DNA | CAAGTGCAGCTGCAAGAGAGCGGAGGAGGA |
| | Sequence | AGCGTCCAAGCCGGAGGCTCTCTGAGACTG |
| | Encoding | AGCTGTGCCGCCAGCGGCTACTCCAACTGC |
| | SEQ ID NO: | AGCTACGACATGACTTGGTATAGGCAAGCC |
| | 235 | CCCGGCAAGGAGAGGGAGTTCGTGTCCGCC |
| | | ATCCACAGCGACGGCAGCACTAGATACGCC |
| | | GACAGCGTGAAGGGAAGGTTCTTCATCAGC |
| | | CAAGATAACGCCAAGAACACAGTGTATCTG |
| | | CAGATGAACTCCCTCAAGCCAGAGGACACT |
| | | GCCATGTACTACTGCAAGACAGACCCACTG |
| | | CACTGCAGAGCCCATGGCGGCAGCTGGTAT |
| | | AGCGTGAGGGCCAACTACTGGGGCCAAGGC |
| | | ACACAAGTGACAGTCTCGAGCGGCGGAGGA |
| | | TCCCAAGTGCAGCTGCAAGAGAGCGGAGGA |
| | | GGCAGCGTCCAAGCCGGAGGCTCTCTGAGG |
| | | CTGAGCTGTGCTGCCAGCGGCTACACTTAC |
| | | AGCAGCTACTGCATGGGCTGGTTCAGACAA |
| | | GCCCCCGGCAAGGAGAGAGAGGGCGTGGCT |
| | | CACATCGACAGCGACGGCTCCACAAGCTAC |
| | | GCCGATAGCGTGAAGGGAAGGTTCACAATC |
| | | TCCAAGGACAACGCCAAGAACACTCTGTAC |
| | | CTCCAGATGAACTCTCTGAAGCCAGAGGAC |
| | | ACTGCCATGTACTACTGTGCCGCCGATCCA |
| | | ATTCCCGGCCCCGGCTACTGCGATGGCGGC |
| | | CCTAACAAGTACTGGGGCCAAGGCACACAA |
| | | GTGACTGTCTCGTCTGCTAGCCACCATCAC |
| | | CATCACCAC |
| 334 | DNA | CAAGTGCAGCTGCAAGAGAGCGGAGGAGGA |
| | Sequence | AGCGTCCAAGCCGGAGGCTCTCTGAGACTG |
| | Encoding | AGCTGTGCCGCCAGCGGCTACTCCAACTGC |
| | SEQ ID NO: | AGCTACGACATGACTTGGTATAGGCAAGCC |
| | 236 | CCCGGCAAGGAGAGGGAGTTCGTGTCCGCC |
| | | ATCCACAGCGACGGCAGCACTAGATACGCC |
| | | GACAGCGTGAAGGGAAGGTTCTTCATCAGC |
| | | CAAGATAACGCCAAGAACACAGTGTATCTG |
| | | CAGATGAACTCCCTCAAGCCAGAGGACACT |
| | | GCCATGTACTACTGCAAGACAGACCCACTG |
| | | CACTGCAGAGCCCATGGCGGCAGCTGGTAT |
| | | AGCGTGAGGGCCAACTACTGGGGCCAAGGC |
| | | ACACAAGTGACAGTCTCGAGCGGCGGAGGA |
| | | TCCCAAGTGCAGCTGCAAGAGTCCGGAGGA |
| | | GGAAGCGTGCAAGCCGGCGGATCTCTGAGA |
| | | CTGAGCTGTGCCGCCTCTAGGTACACTTAC |
| | | AACAGCTACTGCATGGGCTGGTTCAGACAA |
| | | GCCCCCGGCAAGGAAAGAGAGGGCGTGGCC |
| | | ACTATCGATAGCGACGGCATGACTAGGTAC |
| | | GCTGATAGCGTCAAGGGAAGGTTCACAATC |
| | | TCCAAGGACAATGCTAAGAACACTCTGTAC |
| | | CTCCAGATGAACTCTCTGAAGCCAGAGGAC |
| | | ACAGCCATGTACTACTGCGCTGCCGATGCC |
| | | GACTGCACTATCGCCGCCATGACTACTAAT |
| | | CCTCTGGGCCAAGGCACACAAGTGACTGTC |
| | | TCGTCTGCTAGCCACCATCACCATCACCAC |
| 335 | DNA | CAAGTGCAGCTGCAAGAGAGCGGAGGAGGA |
| | Sequence | AGCGTCCAAGCCGGAGGCTCTCTGAGACTG |
| | Encoding | AGCTGTGCCGCCAGCGGCTACTCCAACTGC |
| | SEQ ID NO: | AGCTACGACATGACTTGGTATAGGCAAGCC |
| | 237 | CCCGGCAAGGAGAGGGAGTTCGTGTCCGCC |
| | | ATCCACAGCGACGGCAGCACTAGATACGCC |
| | | GACAGCGTGAAGGGAAGGTTCTTCATCAGC |
| | | CAAGATAACGCCAAGAACACAGTGTATCTG |
| | | CAGATGAACTCCCTCAAGCCAGAGGACACT |
| | | GCCATGTACTACTGCAAGACAGACCCACTG |
| | | CACTGCAGAGCCCATGGCGGCAGCTGGTAT |
| | | AGCGTGAGGGCCAACTACTGGGGCCAAGGC |
| | | ACACAAGTGACAGTCTCGAGCGGCGGAGGA |
| | | TCCCAAGTGCAGCTGCAAGAGTCCGGCGGA |
| | | GGCAGCGTCCAAGCCGGAGGATCTCTGAGG |
| | | CTGAGCTGTACAGTGAGCAGATACACTGCC |
| | | AGCGTGAACTACATGGGCTGGTTCAGACAA |
| | | GCCCCCGGCAAAGAGAGAGAGGGCGTGGCC |
| | | ACAATCTTCACTGGCGCCGGCACAACATAC |
| | | TACGCCAACTCCGTCAAGGGAAGGTTCACA |
| | | ATCTCTAGGGACAACGCCAAGAACACTGCC |
| | | TATCTGCAGATGAACTCCCTCAAGCCAGAG |
| | | GACACTGCCATCTACTACTGCGCCGTGGAT |
| | | TTCAGAGGCGGACTGCTGTATAGGCCAGCC |
| | | TACGAGTACACTTATAGGGGCCAAGGCACA |
| | | CAAGTGACAGTCTCGTCTGCTAGCCACCAT |
| | | CACCATCACCAC |
| 336 | DNA | CAAGTGCAGCTGCAAGAGAGCGGAGGAGGA |
| | Sequence | AGCGTCCAAGCCGGAGGCTCTCTGAGACTG |
| | Encoding | AGCTGTGCCGCCAGCGGCTACTCCAACTGC |
| | SEQ ID NO: | AGCTACGACATGACTTGGTATAGGCAAGCC |
| | 238 | CCCGGCAAGGAGAGGGAGTTCGTGTCCGCC |
| | | ATCCACAGCGACGGCAGCACTAGATACGCC |
| | | GACAGCGTGAAGGGAAGGTTCTTCATCAGC |
| | | CAAGATAACGCCAAGAACACAGTGTATCTG |
| | | CAGATGAACTCCCTCAAGCCAGAGGACACT |
| | | GCCATGTACTACTGCAAGACAGACCCACTG |
| | | CACTGCAGAGCCCATGGCGGCAGCTGGTAT |
| | | AGCGTGAGGGCCAACTACTGGGGCCAAGGC |
| | | ACACAAGTGACAGTCTCGAGCGGCGGAGGA |
| | | TCCCAAGTGCAGCTGCAAGAGAGCGGAGGA |
| | | GGCAGCGTCGAAGCTGGAGGATCTCTGAGG |
| | | CTGAGCTGTGCTGCCAGCGGCTACACTCAC |
| | | AGCAGCTACTGTATGGGCTGGTTCAGACAA |
| | | GCCCCCGGCAAGGAGAGGGAAGGCGTGGCT |
| | | GCCATCGACGTGGATGGCAGCACTACTTAC |
| | | GCCGACAGCGTGAAGGGAAGGTTCACTATC |
| | | AGCAAGGACAACGCCAAGAACACACTCTAT |
| | | CTGCAGATGAACAGCCTCAAGCCAGAGGAC |
| | | ACTGGCATGTACTACTGCGCCGCCGAGTTC |
| | | GCCGATTGCAGCAGCAACTACTTTCTGCCT |
| | | CCCGGCGCCGTCAGATATTGGGGCCAAGGC |
| | | ACTCAAGTGACAGTCTCGTCTGCTAGCCAC |
| | | CATCACCATCACCAC |
| 337 | DNA | CAAGTGCAGCTGCAAGAGAGCGGAGGAGGA |
| | Sequence | AGCGTCCAAGCCGGAGGCTCTCTGAGACTG |
| | Encoding | AGCTGTGCCGCCAGCGGCTACTCCAACTGC |
| | SEQ ID NO: | AGCTACGACATGACTTGGTATAGGCAAGCC |
| | 239 | CCCGGCAAGGAGAGGGAGTTCGTGTCCGCC |
| | | ATCCACAGCGACGGCAGCACTAGATACGCC |
| | | GACAGCGTGAAGGGAAGGTTCTTCATCAGC |
| | | CAAGATAACGCCAAGAACACAGTGTATCTG |
| | | CAGATGAACTCCCTCAAGCCAGAGGACACT |
| | | GCCATGTACTACTGCAAGACAGACCCACTG |
| | | CACTGCAGAGCCCATGGCGGCAGCTGGTAT |
| | | AGCGTGAGGGCCAACTACTGGGGCCAAGGC |
| | | ACACAAGTGACAGTCTCGAGCGGCGGAGGA |
| | | TCCCAAGTGCAGCTGCAAGAGAGCGGAGGA |
| | | GGAAGCGTCCAAGCCGGAGGATCTCTGAGA |
| | | CTGAGCTGCGCCGCTAGTGGCTACTCCTAC |
| | | AGCAGCTACTGCATGGGCTGGTTTAGGCAA |
| | | GCCCCCGGCAAGGAGAGAGAAGGCGTGGCC |
| | | ACTATCGACAGCGACGGCATGACAAGGTAC |
| | | GCCGACAGCGTGAAGGGAAGGTTCACAATC |
| | | AGCAAGGACAACGCCAAGAACACACTGTAT |
| | | CTGCAGATGAACTCTCTGAAGCCAGAGGAC |
| | | ACTGCCATGTACTACTGTGCCGCTCCTCTG |
| | | TACGACTGTGATAGCGGCGCTGTGGGCAGA |
| | | AATCCACCTTATTGGGGCCAAGGCACTCAA |
| | | GTGACAGTCTCGTCTGCTAGCCACCATCAC |
| | | CATCACCAC |
| 338 | DNA | CAAGTGCAGCTGCAAGAGAGCGGAGGAGGA |
| | Sequence | AGCGTCCAAGCCGGAGGCTCTCTGAGACTG |
| | Encoding | AGCTGTGCCGCCAGCGGCTACTCCAACTGC |
| | SEQ ID NO: | AGCTACGACATGACTTGGTATAGGCAAGCC |
| | 240 | CCCGGCAAGGAGAGGGAGTTCGTGTCCGCC |
| | | ATCCACAGCGACGGCAGCACTAGATACGCC |
| | | GACAGCGTGAAGGGAAGGTTCTTCATCAGC |
| | | CAAGATAACGCCAAGAACACAGTGTATCTG |
| | | CAGATGAACTCCCTCAAGCCAGAGGACACT |
| | | GCCATGTACTACTGCAAGACAGACCCACTG |
| | | CACTGCAGAGCCCATGGCGGCAGCTGGTAT |
| | | AGCGTGAGGGCCAACTACTGGGGCCAAGGC |
| | | ACACAAGTGACAGTCTCGAGCGGCGGAGGA |
| | | TCCCAAGTGCAGCTGCAAGAGAGCGGAGGC |
| | | GGCAGCGTGCAGACTGGAGGCTCTCTGAGA |
| | | CTGAGCTGTGCTGCCAGCGGCTACACTTAT |
| | | CTGAGGGGCTGTATGGGCTGGTTTAGGCAA |
| | | GCCCCCGGCAAGGAGAGAGAGGGCGTGGCC |
| | | GTCATGGATGTGGTGGGCGATAGGAGAAGC |
| | | TACATCGACAGCGTGAAGGGAAGGTTCACA |
| | | ATCTCTAGGGACAATGCCGCCAACAGCGTC |
| | | TATCTGCAGATGGACAATCTGAAGCCAGAG |
| | | GACACAGCCATGTACTACTGCACTGCCGGC |
| | | CCTAACTGTGTGGGCTGGAGAAGCGGACTG |
| | | GATTACTGGGGCCAAGGCACACAAGTGACA |
| | | GTCTCGTCTGCTAGCCACCATCACCATCAC |
| | | CAC |
| 339 | DNA | CAAGTGCAGCTGCAAGAGAGCGGCGGAGGA |
| | Sequence | AGCGTGCAAGCTGGAGGCTCTCTGAGGCTG |
| | Encoding | AGCTGTGCTGCCAGCGGCTACACTTATAGC |
| | SEQ ID NO: | AGCGGCTGTATGGGCTGGTTCAGACAAGCC |
| | 241 | CCCGGCAAGGAAAGGGAAGCCGTGGCCGCC |
| | | ATCAATTCCGATGGCAGCACAAGCTACGCC |
| | | GACAGCGTGAAGGGAAGGTTCACAATCAGC |
| | | AAGGACAACGCCAAGAACACACTCTATCTG |
| | | CAGATGAACTCTCTGAAGCCAGAGGACACA |
| | | GCCATGTACTACTGCGCCGCTGAGCCTTAC |
| | | TGTAGCGGCGGCTACCCAAGATGGAGCGTC |
| | | GCTGAGTTCGGCTACTGGGGCCAAGGCACA |
| | | CAAGTGACTGTCTCGAGCGGCGGAGGATCC |
| | | CAAGTGCAGCTGCAAGAGAGCGGAGGAGGA |
| | | AGCGTGCAAGCCGGAGGCTCTCTGAGACTG |
| | | AGCTGTGCCGCCTCTAGGTATCTGTACAGC |
| | | ATCGACTACATGGCTTGGTTCAGACAGAGC |
| | | CCCGGCAAGGAGAGGGAGCCAGTGGCTGTC |
| | | ATCTACACTGCCTCCGGCGCCACATTCTAT |
| | | CCAGATAGCGTGAAGGGAAGGTTCACTATC |
| | | AGCCAAGATAACGCCAAGATGACAGTGTAT |
| | | CTGCAGATGAACTCTCTGAAGAGCGAGGAC |
| | | ACTGCCATGTACTACTGTGCCGCCGTGAGG |
| | | AAGACAGATAGCTACCTCTTCGACGCCCAG |
| | | AGCTTCACATACTGGGGCCAAGGCACACAA |
| | | GTGACAGTCTCGTCTGCTAGCCACCATCAC |
| | | CATCACCAC |
| 340 | DNA | CAAGTGCAGCTGCAAGAGAGCGGCGGAGGA |
| | Sequence | AGCGTGCAAGCTGGAGGCTCTCTGAGGCTG |
| | Encoding | AGCTGTGCTGCCAGCGGCTACACTTATAGC |
| | SEQ ID NO: | AGCGGCTGTATGGGCTGGTTCAGACAAGCC |
| | 242 | CCCGGCAAGGAAAGGGAAGCCGTGGCCGCC |
| | | ATCAATTCCGATGGCAGCACAAGCTACGCC |
| | | GACAGCGTGAAGGGAAGGTTCACAATCAGC |
| | | AAGGACAACGCCAAGAACACACTCTATCTG |
| | | CAGATGAACTCTCTGAAGCCAGAGGACACA |
| | | GCCATGTACTACTGCGCCGCTGAGCCTTAC |
| | | TGTAGCGGCGGCTACCCAAGATGGAGCGTC |
| | | GCTGAGTTCGGCTACTGGGGCCAAGGCACA |
| | | CAAGTGACTGTCTCGAGCGGCGGAGGATCC |
| | | CAAGTGCAGCTGCAAGAGAGCGGAGGAGGA |
| | | AGCGTGCAAGCCGGAGGCTCTCTGAGGCTG |
| | | AGCTGTGCCGCCTCTAGGTTCACATACAGC |
| | | AGCTACTGCATGGGCTGGTTCAGACAAGCC |
| | | CCCGGCAAAGAGAGAGAAGGCGTGGCCAGC |
| | | ATCGATAGCGATGGCTCCACTAGCTACACT |
| | | GACAGCGTGAAGGGAAGGTTCACTATCAGC |
| | | AAGGACAACGCCAAGAACACTCTGTATCTG |
| | | CAGATGAACTCTCTGAAGCCAGAGGACACA |
| | | GCCATGTACTACTGTGCCCTCGATCTGATG |
| | | AGCACAGTGGTGCCCGGCTTCTGTGGCTTT |
| | | CTGCTGAGCGCTGGCATGGATTACTGGGGC |
| | | AAGGGCACTCAAGTGACTGTCTCGTCTGCT |
| | | AGCCACCATCACCATCACCAC |
| 341 | DNA | CAAGTGCAGCTGCAAGAGAGCGGCGGAGGA |
| | Sequence | AGCGTGCAAGCTGGAGGCTCTCTGAGGCTG |
| | Encoding | AGCTGTGCTGCCAGCGGCTACACTTATAGC |
| | SEQ ID NO: | AGCGGCTGTATGGGCTGGTTCAGACAAGCC |
| | 243 | CCCGGCAAGGAAAGGGAAGCCGTGGCCGCC |
| | | ATCAATTCCGATGGCAGCACAAGCTACGCC |
| | | GACAGCGTGAAGGGAAGGTTCACAATCAGC |
| | | AAGGACAACGCCAAGAACACACTCTATCTG |
| | | CAGATGAACTCTCTGAAGCCAGAGGACACA |
| | | GCCATGTACTACTGCGCCGCTGAGCCTTAC |
| | | TGTAGCGGCGGCTACCCAAGATGGAGCGTC |
| | | GCTGAGTTCGGCTACTGGGGCCAAGGCACA |
| | | CAAGTGACTGTCTCGAGCGGCGGAGGATCC |
| | | CAAGTGCAGCTGCAAGAGTCCGGAGGAGGC |
| | | AGCGTCCAAGCCGGAGGCTCTCTGAGGCTG |
| | | AGCTGTGCTGCCAGCGGCTACACTTACAGC |
| | | ATGTACTGCATGGGCTGGTTCAGACAAGCC |
| | | CCCGGCAAGGAAAGAGAGGGCGTGGCCCAG |
| | | ATCAATAGCGATGGCAGCACAAGCTACGCC |
| | | GACAGCGTGAAGGGAAGGTTCACTATCTCC |
| | | AAGGACAACGCCAAGAACACTCTGTATCTG |
| | | CAGATGAACTCTCTGAAGCCAGAGGACACT |
| | | GCCATGTACTACTGCGCTGCCGATTCTAGG |
| | | GTGTACGGCGGCAGCTGGTATGAGAGGCTC |
| | | TGCGGCCCTTACACATACGAGTACAACTAC |
| | | TGGGGCCAAGGCACACAAGTGACTGTCTCG |
| | | TCTGCTAGCCACCATCACCATCACCAC |
| 342 | DNA | CAAGTGCAGCTGCAAGAGAGCGGCGGAGGA |
| | Sequence | AGCGTGCAAGCTGGAGGCTCTCTGAGGCTG |
| | Encoding | AGCTGTGCTGCCAGCGGCTACACTTATAGC |
| | SEQ ID NO: | AGCGGCTGTATGGGCTGGTTCAGACAAGCC |
| | 244 | CCCGGCAAGGAAAGGGAAGCCGTGGCCGCC |
| | | ATCAATTCCGATGGCAGCACAAGCTACGCC |
| | | GACAGCGTGAAGGGAAGGTTCACAATCAGC |
| | | AAGGACAACGCCAAGAACACACTCTATCTG |
| | | CAGATGAACTCTCTGAAGCCAGAGGACACA |
| | | GCCATGTACTACTGCGCCGCTGAGCCTTAC |
| | | TGTAGCGGCGGCTACCCAAGATGGAGCGTC |
| | | GCTGAGTTCGGCTACTGGGGCCAAGGCACA |
| | | CAAGTGACTGTCTCGAGCGGCGGAGGATCC |
| | | CAAGTGCAGCTGCAAGAGAGCGGCGGAGGA |
| | | AGCGTGCAAGCCGGAGGATCTCTGAGACTG |
| | | AGCTGCGCTGTGAGCGGCTACGCCTACTCC |
| | | ACATACTGCATGGGCTGGTTTAGGCAAGCC |
| | | CCCGGCAAAGAGAGAGAGGGCGTGGCTGCT |
| | | ATCGATAGCGGCGGCAGCACAAGCTACGCC |
| | | GATAGCGTGAAGGGAAGGTTCACAATCAGC |
| | | AAGGACAACGCCAAGAACACACTGTATCTG |
| | | AGGATGAACTCTCTGAAGCCAGAGGACACA |
| | | GCCATGTACTACTGTGCTGCTGTGCCTCCT |
| | | CCTCCAGATGGCGGCAGCTGTCTGTTTCTG |
| | | GGACCAGAGATCAAGGTCAGCAAGGCCGAT |
| | | TTTAGGTACTGGGGCCAAGGCACACAAGTG |
| | | ACAGTCTCGTCTGCTAGCCACCATCACCAT |
| | | CACCAC |
| 343 | DNA | CAAGTGCAGCTGCAAGAGAGCGGCGGAGGA |
| | Sequence | AGCGTGCAAGCTGGAGGCTCTCTGAGGCTG |
| | Encoding | AGCTGTGCTGCCAGCGGCTACACTTATAGC |
| | SEQ ID NO: | AGCGGCTGTATGGGCTGGTTCAGACAAGCC |
| | 245 | CCCGGCAAGGAAAGGGAAGCCGTGGCCGCC |
| | | ATCAATTCCGATGGCAGCACAAGCTACGCC |
| | | GACAGCGTGAAGGGAAGGTTCACAATCAGC |
| | | AAGGACAACGCCAAGAACACACTCTATCTG |
| | | CAGATGAACTCTCTGAAGCCAGAGGACACA |
| | | GCCATGTACTACTGCGCCGCTGAGCCTTAC |
| | | TGTAGCGGCGGCTACCCAAGATGGAGCGTC |
| | | GCTGAGTTCGGCTACTGGGGCCAAGGCACA |
| | | CAAGTGACTGTCTCGAGCGGCGGAGGATCC |
| | | CAAGTGCAGCTGCAAGAGAGCGGAGGAGGA |
| | | AGCGTGCAAGCCGGAGGCTCTCTGAGGCTG |
| | | AGCTGTACAGTGTCCGGCTACACTTACAGC |
| | | TCCAATTGCATGGGCTGGTTTAGGCAAGCC |
| | | CCCGGCAAGGAAAGAGAGGGCGTGGCCACT |
| | | ATCTACACTGGCGGCGGCAACACATACTAC |
| | | GCCGATAGCGTGAAGGGAAGGTTCACTATC |
| | | AGCCAAGATAACGCCAAGAACACAGTGTAT |
| | | CTGCAGATGAACAATCTGAAGCCAGAGGAC |
| | | ACTGCCATGTACTACTGTGCTGCTGAGCCA |
| | | CTGTCTAGGGTGTACGGCGGCAGCTGCCCA |
| | | ACTCCTACATTCGACTACTGGGGCCAAGGC |
| | | ACACAAGTGACTGTCTCGTCTGCTAGCCAC |
| | | CATCACCATCACCAC |
| 344 | DNA | CAAGTGCAGCTGCAAGAGAGCGGCGGAGGA |
| | Sequence | AGCGTGCAAGCTGGAGGCTCTCTGAGGCTG |
| | Encoding | AGCTGTGCTGCCAGCGGCTACACTTATAGC |
| | SEQ ID NO: | AGCGGCTGTATGGGCTGGTTCAGACAAGCC |
| | 246 | CCCGGCAAGGAAAGGGAAGCCGTGGCCGCC |
| | | ATCAATTCCGATGGCAGCACAAGCTACGCC |
| | | GACAGCGTGAAGGGAAGGTTCACAATCAGC |
| | | AAGGACAACGCCAAGAACACACTCTATCTG |
| | | CAGATGAACTCTCTGAAGCCAGAGGACACA |
| | | GCCATGTACTACTGCGCCGCTGAGCCTTAC |
| | | TGTAGCGGCGGCTACCCAAGATGGAGCGTC |
| | | GCTGAGTTCGGCTACTGGGGCCAAGGCACA |
| | | CAAGTGACTGTCTCGAGCGGCGGAGGATCC |
| | | CAAGTGCAGCTGCAAGAGAGCGGAGGAGGA |
| | | AGCGTCCAAGCCGGAGGCTCTCTGAGGCTG |
| | | AGCTGTGGAGCCAGCGGCTACACTTACAGC |
| | | AGCTACTGTATGGGCTGGTTTAGGCAAGTG |
| | | CCCGGCAAGGAGAGAGAGGGCGTGGCCGTG |
| | | ATCGATTCCGATGGCAGCACAAGCTACGCT |
| | | GACAGCGTGAAGGGAAGGTTCACAATCAGC |
| | | AAGGACAACGGCAAGAACACACTCTATCTG |
| | | CAGATGAACAGCCTCAAGCCAGAGGACACA |
| | | GCCATGTACTACTGCGCCGCTGATCTGGGC |
| | | CACTATAGGCCTCCTTGTGGCGTGCTGTAT |
| | | CTGGGCATGGATTACTGGGGCAAGGGCACA |
| | | CAAGTGACAGTCTCGTCTGCTAGCCACCAT |
| | | CACCATCACCAC |
| 345 | DNA | CAAGTGCAGCTGCAAGAGAGCGGCGGAGGA |
| | Sequence | AGCGTGCAAGCTGGAGGCTCTCTGAGGCTG |
| | Encoding | AGCTGTGCTGCCAGCGGCTACACTTATAGC |
| | SEQ ID NO: | AGCGGCTGTATGGGCTGGTTCAGACAAGCC |
| | 247 | CCCGGCAAGGAAAGGGAAGCCGTGGCCGCC |
| | | ATCAATTCCGATGGCAGCACAAGCTACGCC |
| | | GACAGCGTGAAGGGAAGGTTCACAATCAGC |
| | | AAGGACAACGCCAAGAACACACTCTATCTG |
| | | CAGATGAACTCTCTGAAGCCAGAGGACACA |
| | | GCCATGTACTACTGCGCCGCTGAGCCTTAC |
| | | TGTAGCGGCGGCTACCCAAGATGGAGCGTC |
| | | GCTGAGTTCGGCTACTGGGGCCAAGGCACA |
| | | CAAGTGACTGTCTCGAGCGGCGGAGGATCC |
| | | CAAGTGCAGCTGCAAGAGAGCGGAGGAGGA |
| | | AGCGTCCAAGCCGGAGGCTCTCTGAGACTG |
| | | AGCTGTGCCGCCAGCGGCTACTCCAACTGC |
| | | AGCTACGACATGACTTGGTATAGGCAAGCC |
| | | CCCGGCAAGGAGAGGGAGTTCGTGTCCGCC |
| | | ATCCACAGCGACGGCAGCACTAGATACGCC |
| | | GACAGCGTGAAGGGAAGGTTCTTCATCAGC |
| | | CAAGATAACGCCAAGAACACAGTGTATCTG |
| | | CAGATGAACTCCCTCAAGCCAGAGGACACT |
| | | GCCATGTACTACTGCAAGACAGACCCACTG |
| | | CACTGCAGAGCCCATGGCGGCAGCTGGTAT |
| | | AGCGTGAGGGCCAACTACTGGGGCCAAGGC |
| | | ACACAAGTGACAGTCTCGTCTGCTAGCCAC |
| | | CATCACCATCACCAC |
| 346 | DNA | CAAGTGCAGCTGCAAGAGAGCGGAGGAGGC |
| | Sequence | AGCGTCCAAGCCGGAGGCTCTCTGAGGCTG |
| | Encoding | AGCTGTGCTGCCAGCGGCTACACTTACAGC |
| | SEQ ID NO: | AGCTACTGCATGGGCTGGTTCAGACAAGCC |
| | 248 | CCCGGCAAGGAGAGAGAGGGCGTGGCTCAC |
| | | ATCGACAGCGACGGCTCCACAAGCTACGCC |
| | | GATAGCGTGAAGGGAAGGTTCACAATCTCC |
| | | AAGGACAACGCCAAGAACACTCTGTACCTC |
| | | CAGATGAACTCTCTGAAGCCAGAGGACACT |
| | | GCCATGTACTACTGTGCCGCCGATCCAATT |
| | | CCCGGCCCCGGCTACTGCGATGGCGGCCCT |
| | | AACAAGTACTGGGGCCAAGGCACACAAGTG |
| | | ACTGTCTCGAGCGGCGGAGGATCCCAAGTG |
| | | CAGCTGCAAGAGAGCGGAGGAGGAAGCGTG |
| | | CAAGCCGGAGGCTCTCTGAGACTGAGCTGT |
| | | GCCGCCTCTAGGTATCTGTACAGCATCGAC |
| | | TACATGGCTTGGTTCAGACAGAGCCCCGGC |
| | | AAGGAGAGGGAGCCAGTGGCTGTCATCTAC |
| | | ACTGCCTCCGGCGCCACATTCTATCCAGAT |
| | | AGCGTGAAGGGAAGGTTCACTATCAGCCAA |
| | | GATAACGCCAAGATGACAGTGTATCTGCAG |
| | | ATGAACTCTCTGAAGAGCGAGGACACTGCC |
| | | ATGTACTACTGTGCCGCCGTGAGGAAGACA |
| | | GATAGCTACCTCTTCGACGCCCAGAGCTTC |
| | | ACATACTGGGGCCAAGGCACACAAGTGACA |
| | | GTCTCGTCTGCTAGCCACCATCACCATCAC |
| | | CAC |
| 347 | DNA | CAAGTGCAGCTGCAAGAGAGCGGAGGAGGC |
| | Sequence | AGCGTCCAAGCCGGAGGCTCTCTGAGGCTG |
| | Encoding | AGCTGTGCTGCCAGCGGCTACACTTACAGC |
| | SEQ ID NO: | AGCTACTGCATGGGCTGGTTCAGACAAGCC |
| | 249 | CCCGGCAAGGAGAGAGAGGGCGTGGCTCAC |
| | | ATCGACAGCGACGGCTCCACAAGCTACGCC |
| | | GATAGCGTGAAGGGAAGGTTCACAATCTCC |
| | | AAGGACAACGCCAAGAACACTCTGTACCTC |
| | | CAGATGAACTCTCTGAAGCCAGAGGACACT |
| | | GCCATGTACTACTGTGCCGCCGATCCAATT |
| | | CCCGGCCCCGGCTACTGCGATGGCGGCCCT |
| | | AACAAGTACTGGGGCCAAGGCACACAAGTG |
| | | ACTGTCTCGAGCGGCGGAGGATCCCAAGTG |
| | | CAGCTGCAAGAGAGCGGAGGAGGAAGCGTG |
| | | CAAGCCGGAGGCTCTCTGAGGCTGAGCTGT |
| | | GCCGCCTCTAGGTTCACATACAGCAGCTAC |
| | | TGCATGGGCTGGTTCAGACAAGCCCCCGGC |
| | | AAAGAGAGAGAAGGCGTGGCCAGCATCGAT |
| | | AGCGATGGCTCCACTAGCTACACTGACAGC |
| | | GTGAAGGGAAGGTTCACTATCAGCAAGGAC |
| | | AACGCCAAGAACACTCTGTATCTGCAGATG |
| | | AACTCTCTGAAGCCAGAGGACACAGCCATG |
| | | TACTACTGTGCCCTCGATCTGATGAGCACA |
| | | GTGGTGCCCGGCTTCTGTGGCTTTCTGCTG |
| | | AGCGCTGGCATGGATTACTGGGGCAAGGGC |
| | | ACTCAAGTGACTGTCTCGTCTGCTAGCCAC |
| | | CATCACCATCACCAC |
| 348 | DNA | CAAGTGCAGCTGCAAGAGAGCGGAGGAGGC |
| | Sequence | AGCGTCCAAGCCGGAGGCTCTCTGAGGCTG |
| | Encoding | AGCTGTGCTGCCAGCGGCTACACTTACAGC |
| | SEQ ID NO: | AGCTACTGCATGGGCTGGTTCAGACAAGCC |
| | 250 | CCCGGCAAGGAGAGAGAGGGCGTGGCTCAC |
| | | ATCGACAGCGACGGCTCCACAAGCTACGCC |
| | | GATAGCGTGAAGGGAAGGTTCACAATCTCC |
| | | AAGGACAACGCCAAGAACACTCTGTACCTC |
| | | CAGATGAACTCTCTGAAGCCAGAGGACACT |
| | | GCCATGTACTACTGTGCCGCCGATCCAATT |
| | | CCCGGCCCCGGCTACTGCGATGGCGGCCCT |
| | | AACAAGTACTGGGGCCAAGGCACACAAGTG |
| | | ACTGTCTCGAGCGGCGGAGGATCCCAAGTG |
| | | CAGCTGCAAGAGTCCGGAGGAGGCAGCGTC |
| | | CAAGCCGGAGGCTCTCTGAGGCTGAGCTGT |
| | | GCTGCCAGCGGCTACACTTACAGCATGTAC |
| | | TGCATGGGCTGGTTCAGACAAGCCCCCGGC |
| | | AAGGAAAGAGAGGGCGTGGCCCAGATCAAT |
| | | AGCGATGGCAGCACAAGCTACGCCGACAGC |
| | | GTGAAGGGAAGGTTCACTATCTCCAAGGAC |
| | | AACGCCAAGAACACTCTGTATCTGCAGATG |
| | | AACTCTCTGAAGCCAGAGGACACTGCCATG |
| | | TACTACTGCGCTGCCGATTCTAGGGTGTAC |
| | | GGCGGCAGCTGGTATGAGAGGCTCTGCGGC |
| | | CCTTACACATACGAGTACAACTACTGGGGC |
| | | CAAGGCACACAAGTGACTGTCTCGTCTGCT |
| | | AGCCACCATCACCATCACCAC |
| 349 | DNA | CAAGTGCAGCTGCAAGAGAGCGGAGGAGGC |
| | Sequence | AGCGTCCAAGCCGGAGGCTCTCTGAGGCTG |
| | Encoding | AGCTGTGCTGCCAGCGGCTACACTTACAGC |
| | SEQ ID NO: | AGCTACTGCATGGGCTGGTTCAGACAAGCC |
| | 251 | CCCGGCAAGGAGAGAGAGGGCGTGGCTCAC |
| | | ATCGACAGCGACGGCTCCACAAGCTACGCC |
| | | GATAGCGTGAAGGGAAGGTTCACAATCTCC |
| | | AAGGACAACGCCAAGAACACTCTGTACCTC |
| | | CAGATGAACTCTCTGAAGCCAGAGGACACT |
| | | GCCATGTACTACTGTGCCGCCGATCCAATT |
| | | CCCGGCCCCGGCTACTGCGATGGCGGCCCT |
| | | AACAAGTACTGGGGCCAAGGCACACAAGTG |
| | | ACTGTCTCGAGCGGCGGAGGATCCCAAGTG |
| | | CAGCTGCAAGAGAGCGGCGGAGGAAGCGTG |
| | | CAAGCCGGAGGATCTCTGAGACTGAGCTGC |
| | | GCTGTGAGCGGCTACGCCTACTCCACATAC |
| | | TGCATGGGCTGGTTTAGGCAAGCCCCCGGC |
| | | AAAGAGAGAGAGGGCGTGGCTGCTATCGAT |
| | | AGCGGCGGCAGCACAAGCTACGCCGATAGC |
| | | GTGAAGGGAAGGTTCACAATCAGCAAGGAC |
| | | AACGCCAAGAACACACTGTATCTGAGGATG |
| | | AACTCTCTGAAGCCAGAGGACACAGCCATG |
| | | TACTACTGTGCTGCTGTGCCTCCTCCTCCA |
| | | GATGGCGGCAGCTGTCTGTTTCTGGGACCA |
| | | GAGATCAAGGTCAGCAAGGCCGATTTTAGG |
| | | TACTGGGGCCAAGGCACACAAGTGACAGTC |
| | | TCGTCTGCTAGCCACCATCACCATCACCAC |
| 350 | DNA | CAAGTGCAGCTGCAAGAGAGCGGAGGAGGC |
| | Sequence | AGCGTCCAAGCCGGAGGCTCTCTGAGGCTG |
| | Encoding | AGCTGTGCTGCCAGCGGCTACACTTACAGC |
| | SEQ ID NO: | AGCTACTGCATGGGCTGGTTCAGACAAGCC |
| | 252 | CCCGGCAAGGAGAGAGAGGGCGTGGCTCAC |
| | | ATCGACAGCGACGGCTCCACAAGCTACGCC |
| | | GATAGCGTGAAGGGAAGGTTCACAATCTCC |
| | | AAGGACAACGCCAAGAACACTCTGTACCTC |
| | | CAGATGAACTCTCTGAAGCCAGAGGACACT |
| | | GCCATGTACTACTGTGCCGCCGATCCAATT |
| | | CCCGGCCCCGGCTACTGCGATGGCGGCCCT |
| | | AACAAGTACTGGGGCCAAGGCACACAAGTG |
| | | ACTGTCTCGAGCGGCGGAGGATCCCAAGTG |
| | | CAGCTGCAAGAGAGCGGAGGAGGAAGCGTG |
| | | CAAGCCGGAGGCTCTCTGAGGCTGAGCTGT |
| | | ACAGTGTCCGGCTACACTTACAGCTCCAAT |
| | | TGCATGGGCTGGTTTAGGCAAGCCCCCGGC |
| | | AAGGAAAGAGAGGGCGTGGCCACTATCTAC |
| | | ACTGGCGGCGGCAACACATACTACGCCGAT |
| | | AGCGTGAAGGGAAGGTTCACTATCAGCCAA |
| | | GATAACGCCAAGAACACAGTGTATCTGCAG |
| | | ATGAACAATCTGAAGCCAGAGGACACTGCC |
| | | ATGTACTACTGTGCTGCTGAGCCACTGTCT |
| | | AGGGTGTACGGCGGCAGCTGCCCAACTCCT |
| | | ACATTCGACTACTGGGGCCAAGGCACACAA |
| | | GTGACTGTCTCGTCTGCTAGCCACCATCAC |
| | | CATCACCAC |
| 351 | DNA | CAAGTGCAGCTGCAAGAGAGCGGAGGAGGC |
| | Sequence | AGCGTCCAAGCCGGAGGCTCTCTGAGGCTG |
| | Encoding | AGCTGTGCTGCCAGCGGCTACACTTACAGC |
| | SEQ ID NO: | AGCTACTGCATGGGCTGGTTCAGACAAGCC |
| | 253 | CCCGGCAAGGAGAGAGAGGGCGTGGCTCAC |
| | | ATCGACAGCGACGGCTCCACAAGCTACGCC |
| | | GATAGCGTGAAGGGAAGGTTCACAATCTCC |
| | | AAGGACAACGCCAAGAACACTCTGTACCTC |
| | | CAGATGAACTCTCTGAAGCCAGAGGACACT |
| | | GCCATGTACTACTGTGCCGCCGATCCAATT |
| | | CCCGGCCCCGGCTACTGCGATGGCGGCCCT |
| | | AACAAGTACTGGGGCCAAGGCACACAAGTG |
| | | ACTGTCTCGAGCGGCGGAGGATCCCAAGTG |
| | | CAGCTGCAAGAGAGCGGAGGAGGAAGCGTC |
| | | CAAGCCGGAGGCTCTCTGAGGCTGAGCTGT |
| | | GGAGCCAGCGGCTACACTTACAGCAGCTAC |
| | | TGTATGGGCTGGTTTAGGCAAGTGCCCGGC |
| | | AAGGAGAGAGAGGGCGTGGCCGTGATCGAT |
| | | TCCGATGGCAGCACAAGCTACGCTGACAGC |
| | | GTGAAGGGAAGGTTCACAATCAGCAAGGAC |
| | | AACGGCAAGAACACACTCTATCTGCAGATG |
| | | AACAGCCTCAAGCCAGAGGACACAGCCATG |
| | | TACTACTGCGCCGCTGATCTGGGCCACTAT |
| | | AGGCCTCCTTGTGGCGTGCTGTATCTGGGC |
| | | ATGGATTACTGGGGCAAGGGCACACAAGTG |
| | | ACAGTCTCGTCTGCTAGCCACCATCACCAT |
| | | CACCAC |
| 352 | DNA | CAAGTGCAGCTGCAAGAGAGCGGAGGAGGC |
| | Sequence | AGCGTCCAAGCCGGAGGCTCTCTGAGGCTG |
| | Encoding | AGCTGTGCTGCCAGCGGCTACACTTACAGC |
| | SEQ ID NO: | AGCTACTGCATGGGCTGGTTCAGACAAGCC |
| | 254 | CCCGGCAAGGAGAGAGAGGGCGTGGCTCAC |
| | | ATCGACAGCGACGGCTCCACAAGCTACGCC |
| | | GATAGCGTGAAGGGAAGGTTCACAATCTCC |
| | | AAGGACAACGCCAAGAACACTCTGTACCTC |
| | | CAGATGAACTCTCTGAAGCCAGAGGACACT |
| | | GCCATGTACTACTGTGCCGCCGATCCAATT |
| | | CCCGGCCCCGGCTACTGCGATGGCGGCCCT |
| | | AACAAGTACTGGGGCCAAGGCACACAAGTG |
| | | ACTGTCTCGAGCGGCGGAGGATCCCAAGTG |
| | | CAGCTGCAAGAGAGCGGAGGAGGAAGCGTC |
| | | CAAGCCGGAGGCTCTCTGAGACTGAGCTGT |
| | | GCCGCCAGCGGCTACTCCAACTGCAGCTAC |
| | | GACATGACTTGGTATAGGCAAGCCCCCGGC |
| | | AAGGAGAGGGAGTTCGTGTCCGCCATCCAC |
| | | AGCGACGGCAGCACTAGATACGCCGACAGC |
| | | GTGAAGGGAAGGTTCTTCATCAGCCAAGAT |
| | | AACGCCAAGAACACAGTGTATCTGCAGATG |
| | | AACTCCCTCAAGCCAGAGGACACTGCCATG |
| | | TACTACTGCAAGACAGACCCACTGCACTGC |
| | | AGAGCCCATGGCGGCAGCTGGTATAGCGTG |
| | | AGGGCCAACTACTGGGGCCAAGGCACACAA |
| | | GTGACAGTCTCGTCTGCTAGCCACCATCAC |
| | | CATCACCAC |
| 353 | DNA | CAAGTGCAGCTGCAAGAGTCCGGAGGAGGA |
| | Sequence | AGCGTGCAAGCCGGCGGATCTCTGAGACTG |
| | Encoding | AGCTGTGCCGCCTCTAGGTACACTTACAAC |
| | SEQ ID NO: | AGCTACTGCATGGGCTGGTTCAGACAAGCC |
| | 255 | CCCGGCAAGGAAAGAGAGGGCGTGGCCACT |
| | | ATCGATAGCGACGGCATGACTAGGTACGCT |
| | | GATAGCGTCAAGGGAAGGTTCACAATCTCC |
| | | AAGGACAATGCTAAGAACACTCTGTACCTC |
| | | CAGATGAACTCTCTGAAGCCAGAGGACACA |
| | | GCCATGTACTACTGCGCTGCCGATGCCGAC |
| | | TGCACTATCGCCGCCATGACTACTAATCCT |
| | | CTGGGCCAAGGCACACAAGTGACTGTCTCG |
| | | AGCGGCGGAGGATCCCAAGTGCAGCTGCAA |
| | | GAGAGCGGAGGAGGAAGCGTGCAAGCCGGA |
| | | GGCTCTCTGAGACTGAGCTGTGCCGCCTCT |
| | | AGGTATCTGTACAGCATCGACTACATGGCT |
| | | TGGTTCAGACAGAGCCCCGGCAAGGAGAGG |
| | | GAGCCAGTGGCTGTCATCTACACTGCCTCC |
| | | GGCGCCACATTCTATCCAGATAGCGTGAAG |
| | | GGAAGGTTCACTATCAGCCAAGATAACGCC |
| | | AAGATGACAGTGTATCTGCAGATGAACTCT |
| | | CTGAAGAGCGAGGACACTGCCATGTACTAC |
| | | TGTGCCGCCGTGAGGAAGACAGATAGCTAC |
| | | CTCTTCGACGCCCAGAGCTTCACATACTGG |
| | | GGCCAAGGCACACAAGTGACAGTCTCGTCT |
| | | GCTAGCCACCATCACCATCACCAC |
| 354 | DNA | CAAGTGCAGCTGCAAGAGTCCGGAGGAGGA |
| | Sequence | AGCGTGCAAGCCGGCGGATCTCTGAGACTG |
| | Encoding | AGCTGTGCCGCCTCTAGGTACACTTACAAC |
| | SEQ ID NO: | AGCTACTGCATGGGCTGGTTCAGACAAGCC |
| | 256 | CCCGGCAAGGAAAGAGAGGGCGTGGCCACT |
| | | ATCGATAGCGACGGCATGACTAGGTACGCT |
| | | GATAGCGTCAAGGGAAGGTTCACAATCTCC |
| | | AAGGACAATGCTAAGAACACTCTGTACCTC |
| | | CAGATGAACTCTCTGAAGCCAGAGGACACA |
| | | GCCATGTACTACTGCGCTGCCGATGCCGAC |
| | | TGCACTATCGCCGCCATGACTACTAATCCT |
| | | CTGGGCCAAGGCACACAAGTGACTGTCTCG |
| | | AGCGGCGGAGGATCCCAAGTGCAGCTGCAA |
| | | GAGAGCGGAGGAGGAAGCGTGCAAGCCGGA |
| | | GGCTCTCTGAGGCTGAGCTGTGCCGCCTCT |
| | | AGGTTCACATACAGCAGCTACTGCATGGGC |
| | | TGGTTCAGACAAGCCCCCGGCAAAGAGAGA |
| | | GAAGGCGTGGCCAGCATCGATAGCGATGGC |
| | | TCCACTAGCTACACTGACAGCGTGAAGGGA |
| | | AGGTTCACTATCAGCAAGGACAACGCCAAG |
| | | AACACTCTGTATCTGCAGATGAACTCTCTG |
| | | AAGCCAGAGGACACAGCCATGTACTACTGT |
| | | GCCCTCGATCTGATGAGCACAGTGGTGCCC |
| | | GGCTTCTGTGGCTTTCTGCTGAGCGCTGGC |
| | | ATGGATTACTGGGGCAAGGGCACTCAAGTG |
| | | ACTGTCTCGTCTGCTAGCCACCATCACCAT |
| | | CACCAC |
| 355 | DNA | CAAGTGCAGCTGCAAGAGTCCGGAGGAGGA |
| | Sequence | AGCGTGCAAGCCGGCGGATCTCTGAGACTG |
| | Encoding | AGCTGTGCCGCCTCTAGGTACACTTACAAC |
| | SEQ ID NO: | AGCTACTGCATGGGCTGGTTCAGACAAGCC |
| | 257 | CCCGGCAAGGAAAGAGAGGGCGTGGCCACT |
| | | ATCGATAGCGACGGCATGACTAGGTACGCT |
| | | GATAGCGTCAAGGGAAGGTTCACAATCTCC |
| | | AAGGACAATGCTAAGAACACTCTGTACCTC |
| | | CAGATGAACTCTCTGAAGCCAGAGGACACA |
| | | GCCATGTACTACTGCGCTGCCGATGCCGAC |
| | | TGCACTATCGCCGCCATGACTACTAATCCT |
| | | CTGGGCCAAGGCACACAAGTGACTGTCTCG |
| | | AGCGGCGGAGGATCCCAAGTGCAGCTGCAA |
| | | GAGTCCGGAGGAGGCAGCGTCCAAGCCGGA |
| | | GGCTCTCTGAGGCTGAGCTGTGCTGCCAGC |
| | | GGCTACACTTACAGCATGTACTGCATGGGC |
| | | TGGTTCAGACAAGCCCCCGGCAAGGAAAGA |
| | | GAGGGCGTGGCCCAGATCAATAGCGATGGC |
| | | AGCACAAGCTACGCCGACAGCGTGAAGGGA |
| | | AGGTTCACTATCTCCAAGGACAACGCCAAG |
| | | AACACTCTGTATCTGCAGATGAACTCTCTG |
| | | AAGCCAGAGGACACTGCCATGTACTACTGC |
| | | GCTGCCGATTCTAGGGTGTACGGCGGCAGC |
| | | TGGTATGAGAGGCTCTGCGGCCCTTACACA |
| | | TACGAGTACAACTACTGGGGCCAAGGCACA |
| | | CAAGTGACTGTCTCGTCTGCTAGCCACCAT |
| | | CACCATCACCAC |
| 356 | DNA | CAAGTGCAGCTGCAAGAGTCCGGAGGAGGA |
| | Sequence | AGCGTGCAAGCCGGCGGATCTCTGAGACTG |
| | Encoding | AGCTGTGCCGCCTCTAGGTACACTTACAAC |
| | SEQ ID NO: | AGCTACTGCATGGGCTGGTTCAGACAAGCC |
| | 258 | CCCGGCAAGGAAAGAGAGGGCGTGGCCACT |
| | | ATCGATAGCGACGGCATGACTAGGTACGCT |
| | | GATAGCGTCAAGGGAAGGTTCACAATCTCC |
| | | AAGGACAATGCTAAGAACACTCTGTACCTC |
| | | CAGATGAACTCTCTGAAGCCAGAGGACACA |
| | | GCCATGTACTACTGCGCTGCCGATGCCGAC |
| | | TGCACTATCGCCGCCATGACTACTAATCCT |
| | | CTGGGCCAAGGCACACAAGTGACTGTCTCG |
| | | AGCGGCGGAGGATCCCAAGTGCAGCTGCAA |
| | | GAGAGCGGCGGAGGAAGCGTGCAAGCCGGA |
| | | GGATCTCTGAGACTGAGCTGCGCTGTGAGC |
| | | GGCTACGCCTACTCCACATACTGCATGGGC |
| | | TGGTTTAGGCAAGCCCCCGGCAAAGAGAGA |
| | | GAGGGCGTGGCTGCTATCGATAGCGGCGGC |
| | | AGCACAAGCTACGCCGATAGCGTGAAGGGA |
| | | AGGTTCACAATCAGCAAGGACAACGCCAAG |
| | | AACACACTGTATCTGAGGATGAACTCTCTG |
| | | AAGCCAGAGGACACAGCCATGTACTACTGT |
| | | GCTGCTGTGCCTCCTCCTCCAGATGGCGGC |
| | | AGCTGTCTGTTTCTGGGACCAGAGATCAAG |
| | | GTCAGCAAGGCCGATTTTAGGTACTGGGGC |
| | | CAAGGCACACAAGTGACAGTCTCGTCTGCT |
| | | AGCCACCATCACCATCACCAC |
| 357 | DNA | CAAGTGCAGCTGCAAGAGTCCGGAGGAGGA |
| | Sequence | AGCGTGCAAGCCGGCGGATCTCTGAGACTG |
| | Encoding | AGCTGTGCCGCCTCTAGGTACACTTACAAC |
| | SEQ ID NO: | AGCTACTGCATGGGCTGGTTCAGACAAGCC |
| | 259 | CCCGGCAAGGAAAGAGAGGGCGTGGCCACT |
| | | ATCGATAGCGACGGCATGACTAGGTACGCT |
| | | GATAGCGTCAAGGGAAGGTTCACAATCTCC |
| | | AAGGACAATGCTAAGAACACTCTGTACCTC |
| | | CAGATGAACTCTCTGAAGCCAGAGGACACA |
| | | GCCATGTACTACTGCGCTGCCGATGCCGAC |
| | | TGCACTATCGCCGCCATGACTACTAATCCT |
| | | CTGGGCCAAGGCACACAAGTGACTGTCTCG |
| | | AGCGGCGGAGGATCCCAAGTGCAGCTGCAA |
| | | GAGAGCGGAGGAGGAAGCGTGCAAGCCGGA |
| | | GGCTCTCTGAGGCTGAGCTGTACAGTGTCC |
| | | GGCTACACTTACAGCTCCAATTGCATGGGC |
| | | TGGTTTAGGCAAGCCCCCGGCAAGGAAAGA |
| | | GAGGGCGTGGCCACTATCTACACTGGCGGC |
| | | GGCAACACATACTACGCCGATAGCGTGAAG |
| | | GGAAGGTTCACTATCAGCCAAGATAACGCC |
| | | AAGAACACAGTGTATCTGCAGATGAACAAT |
| | | CTGAAGCCAGAGGACACTGCCATGTACTAC |
| | | TGTGCTGCTGAGCCACTGTCTAGGGTGTAC |
| | | GGCGGCAGCTGCCCAACTCCTACATTCGAC |
| | | TACTGGGGCCAAGGCACACAAGTGACTGTC |
| | | TCGTCTGCTAGCCACCATCACCATCACCAC |
| 358 | DNA | CAAGTGCAGCTGCAAGAGTCCGGAGGAGGA |
| | Sequence | AGCGTGCAAGCCGGCGGATCTCTGAGACTG |
| | Encoding | AGCTGTGCCGCCTCTAGGTACACTTACAAC |
| | SEQ ID NO: | AGCTACTGCATGGGCTGGTTCAGACAAGCC |
| | 260 | CCCGGCAAGGAAAGAGAGGGCGTGGCCACT |
| | | ATCGATAGCGACGGCATGACTAGGTACGCT |
| | | GATAGCGTCAAGGGAAGGTTCACAATCTCC |
| | | AAGGACAATGCTAAGAACACTCTGTACCTC |
| | | CAGATGAACTCTCTGAAGCCAGAGGACACA |
| | | GCCATGTACTACTGCGCTGCCGATGCCGAC |
| | | TGCACTATCGCCGCCATGACTACTAATCCT |
| | | CTGGGCCAAGGCACACAAGTGACTGTCTCG |
| | | AGCGGCGGAGGATCCCAAGTGCAGCTGCAA |
| | | GAGAGCGGAGGAGGAAGCGTCCAAGCCGGA |
| | | GGCTCTCTGAGGCTGAGCTGTGGAGCCAGC |
| | | GGCTACACTTACAGCAGCTACTGTATGGGC |
| | | TGGTTTAGGCAAGTGCCCGGCAAGGAGAGA |
| | | GAGGGCGTGGCCGTGATCGATTCCGATGGC |
| | | AGCACAAGCTACGCTGACAGCGTGAAGGGA |
| | | AGGTTCACAATCAGCAAGGACAACGGCAAG |
| | | AACACACTCTATCTGCAGATGAACAGCCTC |
| | | AAGCCAGAGGACACAGCCATGTACTACTGC |
| | | GCCGCTGATCTGGGCCACTATAGGCCTCCT |
| | | TGTGGCGTGCTGTATCTGGGCATGGATTAC |
| | | TGGGGCAAGGGCACACAAGTGACAGTCTCG |
| | | TCTGCTAGCCACCATCACCATCACCAC |
| 359 | DNA | CAAGTGCAGCTGCAAGAGTCCGGAGGAGGA |
| | Sequence | AGCGTGCAAGCCGGCGGATCTCTGAGACTG |
| | Encoding | AGCTGTGCCGCCTCTAGGTACACTTACAAC |
| | SEQ ID NO: | AGCTACTGCATGGGCTGGTTCAGACAAGCC |
| | 261 | CCCGGCAAGGAAAGAGAGGGCGTGGCCACT |
| | | ATCGATAGCGACGGCATGACTAGGTACGCT |
| | | GATAGCGTCAAGGGAAGGTTCACAATCTCC |
| | | AAGGACAATGCTAAGAACACTCTGTACCTC |
| | | CAGATGAACTCTCTGAAGCCAGAGGACACA |
| | | GCCATGTACTACTGCGCTGCCGATGCCGAC |
| | | TGCACTATCGCCGCCATGACTACTAATCCT |
| | | CTGGGCCAAGGCACACAAGTGACTGTCTCG |
| | | AGCGGCGGAGGATCCCAAGTGCAGCTGCAA |
| | | GAGAGCGGAGGAGGAAGCGTCCAAGCCGGA |
| | | GGCTCTCTGAGACTGAGCTGTGCCGCCAGC |
| | | GGCTACTCCAACTGCAGCTACGACATGACT |
| | | TGGTATAGGCAAGCCCCCGGCAAGGAGAGG |
| | | GAGTTCGTGTCCGCCATCCACAGCGACGGC |
| | | AGCACTAGATACGCCGACAGCGTGAAGGGA |
| | | AGGTTCTTCATCAGCCAAGATAACGCCAAG |
| | | AACACAGTGTATCTGCAGATGAACTCCCTC |
| | | AAGCCAGAGGACACTGCCATGTACTACTGC |
| | | AAGACAGACCCACTGCACTGCAGAGCCCAT |
| | | GGCGGCAGCTGGTATAGCGTGAGGGCCAAC |
| | | TACTGGGGCCAAGGCACACAAGTGACAGTC |
| | | TCGTCTGCTAGCCACCATCACCATCACCAC |
| 360 | DNA | CAAGTGCAGCTGCAAGAGTCCGGCGGAGGC |
| | Sequence | AGCGTCCAAGCCGGAGGATCTCTGAGGCTG |
| | Encoding | AGCTGTACAGTGAGCAGATACACTGCCAGC |
| | SEQ ID NO: | GTGAACTACATGGGCTGGTTCAGACAAGCC |
| | 262 | CCCGGCAAAGAGAGAGAGGGCGTGGCCACA |
| | | ATCTTCACTGGCGCCGGCACAACATACTAC |
| | | GCCAACTCCGTCAAGGGAAGGTTCACAATC |
| | | TCTAGGGACAACGCCAAGAACACTGCCTAT |
| | | CTGCAGATGAACTCCCTCAAGCCAGAGGAC |
| | | ACTGCCATCTACTACTGCGCCGTGGATTTC |
| | | AGAGGCGGACTGCTGTATAGGCCAGCCTAC |
| | | GAGTACACTTATAGGGGCCAAGGCACACAA |
| | | GTGACAGTCTCGAGCGGCGGAGGATCCCAA |
| | | GTGCAGCTGCAAGAGAGCGGAGGAGGAAGC |
| | | GTGCAAGCCGGAGGCTCTCTGAGACTGAGC |
| | | TGTGCCGCCTCTAGGTATCTGTACAGCATC |
| | | GACTACATGGCTTGGTTCAGACAGAGCCCC |
| | | GGCAAGGAGAGGGAGCCAGTGGCTGTCATC |
| | | TACACTGCCTCCGGCGCCACATTCTATCCA |
| | | GATAGCGTGAAGGGAAGGTTCACTATCAGC |
| | | CAAGATAACGCCAAGATGACAGTGTATCTG |
| | | CAGATGAACTCTCTGAAGAGCGAGGACACT |
| | | GCCATGTACTACTGTGCCGCCGTGAGGAAG |
| | | ACAGATAGCTACCTCTTCGACGCCCAGAGC |
| | | TTCACATACTGGGGCCAAGGCACACAAGTG |
| | | ACAGTCTCGTCTGCTAGCCACCATCACCAT |
| | | CACCAC |
| 361 | DNA | CAAGTGCAGCTGCAAGAGTCCGGCGGAGGC |
| | Sequence | AGCGTCCAAGCCGGAGGATCTCTGAGGCTG |
| | Encoding | AGCTGTACAGTGAGCAGATACACTGCCAGC |
| | SEQ ID NO: | GTGAACTACATGGGCTGGTTCAGACAAGCC |
| | 263 | CCCGGCAAAGAGAGAGAGGGCGTGGCCACA |
| | | ATCTTCACTGGCGCCGGCACAACATACTAC |
| | | GCCAACTCCGTCAAGGGAAGGTTCACAATC |
| | | TCTAGGGACAACGCCAAGAACACTGCCTAT |
| | | CTGCAGATGAACTCCCTCAAGCCAGAGGAC |
| | | ACTGCCATCTACTACTGCGCCGTGGATTTC |
| | | AGAGGCGGACTGCTGTATAGGCCAGCCTAC |
| | | GAGTACACTTATAGGGGCCAAGGCACACAA |
| | | GTGACAGTCTCGAGCGGCGGAGGATCCCAA |
| | | GTGCAGCTGCAAGAGAGCGGAGGAGGAAGC |
| | | GTGCAAGCCGGAGGCTCTCTGAGGCTGAGC |
| | | TGTGCCGCCTCTAGGTTCACATACAGCAGC |
| | | TACTGCATGGGCTGGTTCAGACAAGCCCCC |
| | | GGCAAAGAGAGAGAAGGCGTGGCCAGCATC |
| | | GATAGCGATGGCTCCACTAGCTACACTGAC |
| | | AGCGTGAAGGGAAGGTTCACTATCAGCAAG |
| | | GACAACGCCAAGAACACTCTGTATCTGCAG |
| | | ATGAACTCTCTGAAGCCAGAGGACACAGCC |
| | | ATGTACTACTGTGCCCTCGATCTGATGAGC |
| | | ACAGTGGTGCCCGGCTTCTGTGGCTTTCTG |
| | | CTGAGCGCTGGCATGGATTACTGGGGCAAG |
| | | GGCACTCAAGTGACTGTCTCGTCTGCTAGC |
| | | CACCATCACCATCACCAC |
| 362 | DNA | CAAGTGCAGCTGCAAGAGTCCGGCGGAGGC |
| | Sequence | AGCGTCCAAGCCGGAGGATCTCTGAGGCTG |
| | Encoding | AGCTGTACAGTGAGCAGATACACTGCCAGC |
| | SEQ ID NO: | GTGAACTACATGGGCTGGTTCAGACAAGCC |
| | 264 | CCCGGCAAAGAGAGAGAGGGCGTGGCCACA |
| | | ATCTTCACTGGCGCCGGCACAACATACTAC |
| | | GCCAACTCCGTCAAGGGAAGGTTCACAATC |
| | | TCTAGGGACAACGCCAAGAACACTGCCTAT |
| | | CTGCAGATGAACTCCCTCAAGCCAGAGGAC |
| | | ACTGCCATCTACTACTGCGCCGTGGATTTC |
| | | AGAGGCGGACTGCTGTATAGGCCAGCCTAC |
| | | GAGTACACTTATAGGGGCCAAGGCACACAA |
| | | GTGACAGTCTCGAGCGGCGGAGGATCCCAA |
| | | GTGCAGCTGCAAGAGTCCGGAGGAGGCAGC |
| | | GTCCAAGCCGGAGGCTCTCTGAGGCTGAGC |
| | | TGTGCTGCCAGCGGCTACACTTACAGCATG |
| | | TACTGCATGGGCTGGTTCAGACAAGCCCCC |
| | | GGCAAGGAAAGAGAGGGCGTGGCCCAGATC |
| | | AATAGCGATGGCAGCACAAGCTACGCCGAC |
| | | AGCGTGAAGGGAAGGTTCACTATCTCCAAG |
| | | GACAACGCCAAGAACACTCTGTATCTGCAG |
| | | ATGAACTCTCTGAAGCCAGAGGACACTGCC |
| | | ATGTACTACTGCGCTGCCGATTCTAGGGTG |
| | | TACGGCGGCAGCTGGTATGAGAGGCTCTGC |
| | | GGCCCTTACACATACGAGTACAACTACTGG |
| | | GGCCAAGGCACACAAGTGACTGTCTCGTCT |
| | | GCTAGCCACCATCACCATCACCAC |
| 363 | DNA | CAAGTGCAGCTGCAAGAGTCCGGCGGAGGC |
| | Sequence | AGCGTCCAAGCCGGAGGATCTCTGAGGCTG |
| | Encoding | AGCTGTACAGTGAGCAGATACACTGCCAGC |
| | SEQ ID NO: | GTGAACTACATGGGCTGGTTCAGACAAGCC |
| | 265 | CCCGGCAAAGAGAGAGAGGGCGTGGCCACA |
| | | ATCTTCACTGGCGCCGGCACAACATACTAC |
| | | GCCAACTCCGTCAAGGGAAGGTTCACAATC |
| | | TCTAGGGACAACGCCAAGAACACTGCCTAT |
| | | CTGCAGATGAACTCCCTCAAGCCAGAGGAC |
| | | ACTGCCATCTACTACTGCGCCGTGGATTTC |
| | | AGAGGCGGACTGCTGTATAGGCCAGCCTAC |
| | | GAGTACACTTATAGGGGCCAAGGCACACAA |
| | | GTGACAGTCTCGAGCGGCGGAGGATCCCAA |
| | | GTGCAGCTGCAAGAGAGCGGCGGAGGAAGC |
| | | GTGCAAGCCGGAGGATCTCTGAGACTGAGC |
| | | TGCGCTGTGAGCGGCTACGCCTACTCCACA |
| | | TACTGCATGGGCTGGTTTAGGCAAGCCCCC |
| | | GGCAAAGAGAGAGAGGGCGTGGCTGCTATC |
| | | GATAGCGGCGGCAGCACAAGCTACGCCGAT |
| | | AGCGTGAAGGGAAGGTTCACAATCAGCAAG |
| | | GACAACGCCAAGAACACACTGTATCTGAGG |
| | | ATGAACTCTCTGAAGCCAGAGGACACAGCC |
| | | ATGTACTACTGTGCTGCTGTGCCTCCTCCT |
| | | CCAGATGGCGGCAGCTGTCTGTTTCTGGGA |
| | | CCAGAGATCAAGGTCAGCAAGGCCGATTTT |
| | | AGGTACTGGGGCCAAGGCACACAAGTGACA |
| | | GTCTCGTCTGCTAGCCACCATCACCATCAC |
| | | CAC |
| 364 | DNA | CAAGTGCAGCTGCAAGAGTCCGGCGGAGGC |
| | Sequence | AGCGTCCAAGCCGGAGGATCTCTGAGGCTG |
| | Encoding | AGCTGTACAGTGAGCAGATACACTGCCAGC |
| | SEQ ID NO: | GTGAACTACATGGGCTGGTTCAGACAAGCC |
| | 266 | CCCGGCAAAGAGAGAGAGGGCGTGGCCACA |
| | | ATCTTCACTGGCGCCGGCACAACATACTAC |
| | | GCCAACTCCGTCAAGGGAAGGTTCACAATC |
| | | TCTAGGGACAACGCCAAGAACACTGCCTAT |
| | | CTGCAGATGAACTCCCTCAAGCCAGAGGAC |
| | | ACTGCCATCTACTACTGCGCCGTGGATTTC |
| | | AGAGGCGGACTGCTGTATAGGCCAGCCTAC |
| | | GAGTACACTTATAGGGGCCAAGGCACACAA |
| | | GTGACAGTCTCGAGCGGCGGAGGATCCCAA |
| | | GTGCAGCTGCAAGAGAGCGGAGGAGGAAGC |
| | | GTGCAAGCCGGAGGCTCTCTGAGGCTGAGC |
| | | TGTACAGTGTCCGGCTACACTTACAGCTCC |
| | | AATTGCATGGGCTGGTTTAGGCAAGCCCCC |
| | | GGCAAGGAAAGAGAGGGCGTGGCCACTATC |
| | | TACACTGGCGGCGGCAACACATACTACGCC |
| | | GATAGCGTGAAGGGAAGGTTCACTATCAGC |
| | | CAAGATAACGCCAAGAACACAGTGTATCTG |
| | | CAGATGAACAATCTGAAGCCAGAGGACACT |
| | | GCCATGTACTACTGTGCTGCTGAGCCACTG |
| | | TCTAGGGTGTACGGCGGCAGCTGCCCAACT |
| | | CCTACATTCGACTACTGGGGCCAAGGCACA |
| | | CAAGTGACTGTCTCGTCTGCTAGCCACCAT |
| | | CACCATCACCAC |
| 365 | DNA | CAAGTGCAGCTGCAAGAGTCCGGCGGAGGC |
| | Sequence | AGCGTCCAAGCCGGAGGATCTCTGAGGCTG |
| | Encoding | AGCTGTACAGTGAGCAGATACACTGCCAGC |
| | SEQ ID NO: | GTGAACTACATGGGCTGGTTCAGACAAGCC |
| | 267 | CCCGGCAAAGAGAGAGAGGGCGTGGCCACA |
| | | ATCTTCACTGGCGCCGGCACAACATACTAC |
| | | GCCAACTCCGTCAAGGGAAGGTTCACAATC |
| | | TCTAGGGACAACGCCAAGAACACTGCCTAT |
| | | CTGCAGATGAACTCCCTCAAGCCAGAGGAC |
| | | ACTGCCATCTACTACTGCGCCGTGGATTTC |
| | | AGAGGCGGACTGCTGTATAGGCCAGCCTAC |
| | | GAGTACACTTATAGGGGCCAAGGCACACAA |
| | | GTGACAGTCTCGAGCGGCGGAGGATCCCAA |
| | | GTGCAGCTGCAAGAGAGCGGAGGAGGAAGC |
| | | GTCCAAGCCGGAGGCTCTCTGAGGCTGAGC |
| | | TGTGGAGCCAGCGGCTACACTTACAGCAGC |
| | | TACTGTATGGGCTGGTTTAGGCAAGTGCCC |
| | | GGCAAGGAGAGAGAGGGCGTGGCCGTGATC |
| | | GATTCCGATGGCAGCACAAGCTACGCTGAC |
| | | AGCGTGAAGGGAAGGTTCACAATCAGCAAG |
| | | GACAACGGCAAGAACACACTCTATCTGCAG |
| | | ATGAACAGCCTCAAGCCAGAGGACACAGCC |
| | | ATGTACTACTGCGCCGCTGATCTGGGCCAC |
| | | TATAGGCCTCCTTGTGGCGTGCTGTATCTG |
| | | GGCATGGATTACTGGGGCAAGGGCACACAA |
| | | GTGACAGTCTCGTCTGCTAGCCACCATCAC |
| | | CATCACCAC |
| 366 | DNA | CAAGTGCAGCTGCAAGAGTCCGGCGGAGGC |
| | Sequence | AGCGTCCAAGCCGGAGGATCTCTGAGGCTG |
| | Encoding | AGCTGTACAGTGAGCAGATACACTGCCAGC |
| | SEQ ID NO: | GTGAACTACATGGGCTGGTTCAGACAAGCC |
| | 268 | CCCGGCAAAGAGAGAGAGGGCGTGGCCACA |
| | | ATCTTCACTGGCGCCGGCACAACATACTAC |
| | | GCCAACTCCGTCAAGGGAAGGTTCACAATC |
| | | TCTAGGGACAACGCCAAGAACACTGCCTAT |
| | | CTGCAGATGAACTCCCTCAAGCCAGAGGAC |
| | | ACTGCCATCTACTACTGCGCCGTGGATTTC |
| | | AGAGGCGGACTGCTGTATAGGCCAGCCTAC |
| | | GAGTACACTTATAGGGGCCAAGGCACACAA |
| | | GTGACAGTCTCGAGCGGCGGAGGATCCCAA |
| | | GTGCAGCTGCAAGAGAGCGGAGGAGGAAGC |
| | | GTCCAAGCCGGAGGCTCTCTGAGACTGAGC |
| | | TGTGCCGCCAGCGGCTACTCCAACTGCAGC |
| | | TACGACATGACTTGGTATAGGCAAGCCCCC |
| | | GGCAAGGAGAGGGAGTTCGTGTCCGCCATC |
| | | CACAGCGACGGCAGCACTAGATACGCCGAC |
| | | AGCGTGAAGGGAAGGTTCTTCATCAGCCAA |
| | | GATAACGCCAAGAACACAGTGTATCTGCAG |
| | | ATGAACTCCCTCAAGCCAGAGGACACTGCC |
| | | ATGTACTACTGCAAGACAGACCCACTGCAC |
| | | TGCAGAGCCCATGGCGGCAGCTGGTATAGC |
| | | GTGAGGGCCAACTACTGGGGCCAAGGCACA |
| | | CAAGTGACAGTCTCGTCTGCTAGCCACCAT |
| | | CACCATCACCAC |
| 367 | DNA | CAAGTGCAGCTGCAAGAGAGCGGAGGAGGC |
| | Sequence | AGCGTCGAAGCTGGAGGATCTCTGAGGCTG |
| | Encoding | AGCTGTGCTGCCAGCGGCTACACTCACAGC |
| | SEQ ID NO: | AGCTACTGTATGGGCTGGTTCAGACAAGCC |
| | 269 | CCCGGCAAGGAGAGGGAAGGCGTGGCTGCC |
| | | ATCGACGTGGATGGCAGCACTACTTACGCC |
| | | GACAGCGTGAAGGGAAGGTTCACTATCAGC |
| | | AAGGACAACGCCAAGAACACACTCTATCTG |
| | | CAGATGAACAGCCTCAAGCCAGAGGACACT |
| | | GGCATGTACTACTGCGCCGCCGAGTTCGCC |
| | | GATTGCAGCAGCAACTACTTTCTGCCTCCC |
| | | GGCGCCGTCAGATATTGGGGCCAAGGCACT |
| | | CAAGTGACAGTCTCGAGCGGCGGAGGATCC |
| | | CAAGTGCAGCTGCAAGAGAGCGGAGGAGGA |
| | | AGCGTGCAAGCCGGAGGCTCTCTGAGACTG |
| | | AGCTGTGCCGCCTCTAGGTATCTGTACAGC |
| | | ATCGACTACATGGCTTGGTTCAGACAGAGC |
| | | CCCGGCAAGGAGAGGGAGCCAGTGGCTGTC |
| | | ATCTACACTGCCTCCGGCGCCACATTCTAT |
| | | CCAGATAGCGTGAAGGGAAGGTTCACTATC |
| | | AGCCAAGATAACGCCAAGATGACAGTGTAT |
| | | CTGCAGATGAACTCTCTGAAGAGCGAGGAC |
| | | ACTGCCATGTACTACTGTGCCGCCGTGAGG |
| | | AAGACAGATAGCTACCTCTTCGACGCCCAG |
| | | AGCTTCACATACTGGGGCCAAGGCACACAA |
| | | GTGACAGTCTCGTCTGCTAGCCACCATCAC |
| | | CATCACCAC |
| 368 | DNA | CAAGTGCAGCTGCAAGAGAGCGGAGGAGGC |
| | Sequence | AGCGTCGAAGCTGGAGGATCTCTGAGGCTG |
| | Encoding | AGCTGTGCTGCCAGCGGCTACACTCACAGC |
| | SEQ ID NO: | AGCTACTGTATGGGCTGGTTCAGACAAGCC |
| | 270 | CCCGGCAAGGAGAGGGAAGGCGTGGCTGCC |
| | | ATCGACGTGGATGGCAGCACTACTTACGCC |
| | | GACAGCGTGAAGGGAAGGTTCACTATCAGC |
| | | AAGGACAACGCCAAGAACACACTCTATCTG |
| | | CAGATGAACAGCCTCAAGCCAGAGGACACT |
| | | GGCATGTACTACTGCGCCGCCGAGTTCGCC |
| | | GATTGCAGCAGCAACTACTTTCTGCCTCCC |
| | | GGCGCCGTCAGATATTGGGGCCAAGGCACT |
| | | CAAGTGACAGTCTCGAGCGGCGGAGGATCC |
| | | CAAGTGCAGCTGCAAGAGAGCGGAGGAGGA |
| | | AGCGTGCAAGCCGGAGGCTCTCTGAGGCTG |
| | | AGCTGTGCCGCCTCTAGGTTCACATACAGC |
| | | AGCTACTGCATGGGCTGGTTCAGACAAGCC |
| | | CCCGGCAAAGAGAGAGAAGGCGTGGCCAGC |
| | | ATCGATAGCGATGGCTCCACTAGCTACACT |
| | | GACAGCGTGAAGGGAAGGTTCACTATCAGC |
| | | AAGGACAACGCCAAGAACACTCTGTATCTG |
| | | CAGATGAACTCTCTGAAGCCAGAGGACACA |
| | | GCCATGTACTACTGTGCCCTCGATCTGATG |
| | | AGCACAGTGGTGCCCGGCTTCTGTGGCTTT |
| | | CTGCTGAGCGCTGGCATGGATTACTGGGGC |
| | | AAGGGCACTCAAGTGACTGTCTCGTCTGCT |
| | | AGCCACCATCACCATCACCAC |
| 369 | DNA | CAAGTGCAGCTGCAAGAGAGCGGAGGAGGC |
| | Sequence | AGCGTCGAAGCTGGAGGATCTCTGAGGCTG |
| | Encoding | AGCTGTGCTGCCAGCGGCTACACTCACAGC |
| | SEQ ID NO: | AGCTACTGTATGGGCTGGTTCAGACAAGCC |
| | 271 | CCCGGCAAGGAGAGGGAAGGCGTGGCTGCC |
| | | ATCGACGTGGATGGCAGCACTACTTACGCC |
| | | GACAGCGTGAAGGGAAGGTTCACTATCAGC |
| | | AAGGACAACGCCAAGAACACACTCTATCTG |
| | | CAGATGAACAGCCTCAAGCCAGAGGACACT |
| | | GGCATGTACTACTGCGCCGCCGAGTTCGCC |
| | | GATTGCAGCAGCAACTACTTTCTGCCTCCC |
| | | GGCGCCGTCAGATATTGGGGCCAAGGCACT |
| | | CAAGTGACAGTCTCGAGCGGCGGAGGATCC |
| | | CAAGTGCAGCTGCAAGAGTCCGGAGGAGGC |
| | | AGCGTCCAAGCCGGAGGCTCTCTGAGGCTG |
| | | AGCTGTGCTGCCAGCGGCTACACTTACAGC |
| | | ATGTACTGCATGGGCTGGTTCAGACAAGCC |
| | | CCCGGCAAGGAAAGAGAGGGCGTGGCCCAG |
| | | ATCAATAGCGATGGCAGCACAAGCTACGCC |
| | | GACAGCGTGAAGGGAAGGTTCACTATCTCC |
| | | AAGGACAACGCCAAGAACACTCTGTATCTG |
| | | CAGATGAACTCTCTGAAGCCAGAGGACACT |
| | | GCCATGTACTACTGCGCTGCCGATTCTAGG |
| | | GTGTACGGCGGCAGCTGGTATGAGAGGCTC |
| | | TGCGGCCCTTACACATACGAGTACAACTAC |
| | | TGGGGCCAAGGCACACAAGTGACTGTCTCG |
| | | TCTGCTAGCCACCATCACCATCACCAC |
| 370 | DNA | CAAGTGCAGCTGCAAGAGAGCGGAGGAGGC |
| | Sequence | AGCGTCGAAGCTGGAGGATCTCTGAGGCTG |
| | Encoding | AGCTGTGCTGCCAGCGGCTACACTCACAGC |
| | SEQ ID NO: | AGCTACTGTATGGGCTGGTTCAGACAAGCC |
| | 272 | CCCGGCAAGGAGAGGGAAGGCGTGGCTGCC |
| | | ATCGACGTGGATGGCAGCACTACTTACGCC |
| | | GACAGCGTGAAGGGAAGGTTCACTATCAGC |
| | | AAGGACAACGCCAAGAACACACTCTATCTG |
| | | CAGATGAACAGCCTCAAGCCAGAGGACACT |
| | | GGCATGTACTACTGCGCCGCCGAGTTCGCC |
| | | GATTGCAGCAGCAACTACTTTCTGCCTCCC |
| | | GGCGCCGTCAGATATTGGGGCCAAGGCACT |
| | | CAAGTGACAGTCTCGAGCGGCGGAGGATCC |
| | | CAAGTGCAGCTGCAAGAGAGCGGCGGAGGA |
| | | AGCGTGCAAGCCGGAGGATCTCTGAGACTG |
| | | AGCTGCGCTGTGAGCGGCTACGCCTACTCC |
| | | ACATACTGCATGGGCTGGTTTAGGCAAGCC |
| | | CCCGGCAAAGAGAGAGAGGGCGTGGCTGCT |
| | | ATCGATAGCGGCGGCAGCACAAGCTACGCC |
| | | GATAGCGTGAAGGGAAGGTTCACAATCAGC |
| | | AAGGACAACGCCAAGAACACACTGTATCTG |
| | | AGGATGAACTCTCTGAAGCCAGAGGACACA |
| | | GCCATGTACTACTGTGCTGCTGTGCCTCCT |
| | | CCTCCAGATGGCGGCAGCTGTCTGTTTCTG |
| | | GGACCAGAGATCAAGGTCAGCAAGGCCGAT |
| | | TTTAGGTACTGGGGCCAAGGCACACAAGTG |
| | | ACAGTCTCGTCTGCTAGCCACCATCACCAT |
| | | CACCAC |
| 371 | DNA | CAAGTGCAGCTGCAAGAGAGCGGAGGAGGC |
| | Sequence | AGCGTCGAAGCTGGAGGATCTCTGAGGCTG |
| | Encoding | AGCTGTGCTGCCAGCGGCTACACTCACAGC |
| | SEQ ID NO: | AGCTACTGTATGGGCTGGTTCAGACAAGCC |
| | 273 | CCCGGCAAGGAGAGGGAAGGCGTGGCTGCC |
| | | ATCGACGTGGATGGCAGCACTACTTACGCC |
| | | GACAGCGTGAAGGGAAGGTTCACTATCAGC |
| | | AAGGACAACGCCAAGAACACACTCTATCTG |
| | | CAGATGAACAGCCTCAAGCCAGAGGACACT |
| | | GGCATGTACTACTGCGCCGCCGAGTTCGCC |
| | | GATTGCAGCAGCAACTACTTTCTGCCTCCC |
| | | GGCGCCGTCAGATATTGGGGCCAAGGCACT |
| | | CAAGTGACAGTCTCGAGCGGCGGAGGATCC |
| | | CAAGTGCAGCTGCAAGAGAGCGGAGGAGGA |
| | | AGCGTGCAAGCCGGAGGCTCTCTGAGGCTG |
| | | AGCTGTACAGTGTCCGGCTACACTTACAGC |
| | | TCCAATTGCATGGGCTGGTTTAGGCAAGCC |
| | | CCCGGCAAGGAAAGAGAGGGCGTGGCCACT |
| | | ATCTACACTGGCGGCGGCAACACATACTAC |
| | | GCCGATAGCGTGAAGGGAAGGTTCACTATC |
| | | AGCCAAGATAACGCCAAGAACACAGTGTAT |
| | | CTGCAGATGAACAATCTGAAGCCAGAGGAC |
| | | ACTGCCATGTACTACTGTGCTGCTGAGCCA |
| | | CTGTCTAGGGTGTACGGCGGCAGCTGCCCA |
| | | ACTCCTACATTCGACTACTGGGGCCAAGGC |
| | | ACACAAGTGACTGTCTCGTCTGCTAGCCAC |
| | | CATCACCATCACCAC |
| 372 | DNA | CAAGTGCAGCTGCAAGAGAGCGGAGGAGGC |
| | Sequence | AGCGTCGAAGCTGGAGGATCTCTGAGGCTG |
| | Encoding | AGCTGTGCTGCCAGCGGCTACACTCACAGC |
| | SEQ ID NO: | AGCTACTGTATGGGCTGGTTCAGACAAGCC |
| | 274 | CCCGGCAAGGAGAGGGAAGGCGTGGCTGCC |
| | | ATCGACGTGGATGGCAGCACTACTTACGCC |
| | | GACAGCGTGAAGGGAAGGTTCACTATCAGC |
| | | AAGGACAACGCCAAGAACACACTCTATCTG |
| | | CAGATGAACAGCCTCAAGCCAGAGGACACT |
| | | GGCATGTACTACTGCGCCGCCGAGTTCGCC |
| | | GATTGCAGCAGCAACTACTTTCTGCCTCCC |
| | | GGCGCCGTCAGATATTGGGGCCAAGGCACT |
| | | CAAGTGACAGTCTCGAGCGGCGGAGGATCC |
| | | CAAGTGCAGCTGCAAGAGAGCGGAGGAGGA |
| | | AGCGTCCAAGCCGGAGGCTCTCTGAGGCTG |
| | | AGCTGTGGAGCCAGCGGCTACACTTACAGC |
| | | AGCTACTGTATGGGCTGGTTTAGGCAAGTG |
| | | CCCGGCAAGGAGAGAGAGGGCGTGGCCGTG |
| | | ATCGATTCCGATGGCAGCACAAGCTACGCT |
| | | GACAGCGTGAAGGGAAGGTTCACAATCAGC |
| | | AAGGACAACGGCAAGAACACACTCTATCTG |
| | | CAGATGAACAGCCTCAAGCCAGAGGACACA |
| | | GCCATGTACTACTGCGCCGCTGATCTGGGC |
| | | CACTATAGGCCTCCTTGTGGCGTGCTGTAT |
| | | CTGGGCATGGATTACTGGGGCAAGGGCACA |
| | | CAAGTGACAGTCTCGTCTGCTAGCCACCAT |
| | | CACCATCACCAC |
| 373 | DNA | CAAGTGCAGCTGCAAGAGAGCGGAGGAGGC |
| | Sequence | AGCGTCGAAGCTGGAGGATCTCTGAGGCTG |
| | Encoding | AGCTGTGCTGCCAGCGGCTACACTCACAGC |
| | SEQ ID NO: | AGCTACTGTATGGGCTGGTTCAGACAAGCC |
| | 275 | CCCGGCAAGGAGAGGGAAGGCGTGGCTGCC |
| | | ATCGACGTGGATGGCAGCACTACTTACGCC |
| | | GACAGCGTGAAGGGAAGGTTCACTATCAGC |
| | | AAGGACAACGCCAAGAACACACTCTATCTG |
| | | CAGATGAACAGCCTCAAGCCAGAGGACACT |
| | | GGCATGTACTACTGCGCCGCCGAGTTCGCC |
| | | GATTGCAGCAGCAACTACTTTCTGCCTCCC |
| | | GGCGCCGTCAGATATTGGGGCCAAGGCACT |
| | | CAAGTGACAGTCTCGAGCGGCGGAGGATCC |
| | | CAAGTGCAGCTGCAAGAGAGCGGAGGAGGA |
| | | AGCGTCCAAGCCGGAGGCTCTCTGAGACTG |
| | | AGCTGTGCCGCCAGCGGCTACTCCAACTGC |
| | | AGCTACGACATGACTTGGTATAGGCAAGCC |
| | | CCCGGCAAGGAGAGGGAGTTCGTGTCCGCC |
| | | ATCCACAGCGACGGCAGCACTAGATACGCC |
| | | GACAGCGTGAAGGGAAGGTTCTTCATCAGC |
| | | CAAGATAACGCCAAGAACACAGTGTATCTG |
| | | CAGATGAACTCCCTCAAGCCAGAGGACACT |
| | | GCCATGTACTACTGCAAGACAGACCCACTG |
| | | CACTGCAGAGCCCATGGCGGCAGCTGGTAT |
| | | AGCGTGAGGGCCAACTACTGGGGCCAAGGC |
| | | ACACAAGTGACAGTCTCGTCTGCTAGCCAC |
| | | CATCACCATCACCAC |
| 374 | DNA | CAAGTGCAGCTGCAAGAGAGCGGAGGAGGA |
| | Sequence | AGCGTCCAAGCCGGAGGATCTCTGAGACTG |
| | Encoding | AGCTGCGCCGCTAGTGGCTACTCCTACAGC |
| | SEQ ID NO: | AGCTACTGCATGGGCTGGTTTAGGCAAGCC |
| | 276 | CCCGGCAAGGAGAGAGAAGGCGTGGCCACT |
| | | ATCGACAGCGACGGCATGACAAGGTACGCC |
| | | GACAGCGTGAAGGGAAGGTTCACAATCAGC |
| | | AAGGACAACGCCAAGAACACACTGTATCTG |
| | | CAGATGAACTCTCTGAAGCCAGAGGACACT |
| | | GCCATGTACTACTGTGCCGCTCCTCTGTAC |
| | | GACTGTGATAGCGGCGCTGTGGGCAGAAAT |
| | | CCACCTTATTGGGGCCAAGGCACTCAAGTG |
| | | ACAGTCTCGAGCGGCGGAGGATCCCAAGTG |
| | | CAGCTGCAAGAGAGCGGAGGAGGAAGCGTG |
| | | CAAGCCGGAGGCTCTCTGAGACTGAGCTGT |
| | | GCCGCCTCTAGGTATCTGTACAGCATCGAC |
| | | TACATGGCTTGGTTCAGACAGAGCCCCGGC |
| | | AAGGAGAGGGAGCCAGTGGCTGTCATCTAC |
| | | ACTGCCTCCGGCGCCACATTCTATCCAGAT |
| | | AGCGTGAAGGGAAGGTTCACTATCAGCCAA |
| | | GATAACGCCAAGATGACAGTGTATCTGCAG |
| | | ATGAACTCTCTGAAGAGCGAGGACACTGCC |
| | | ATGTACTACTGTGCCGCCGTGAGGAAGACA |
| | | GATAGCTACCTCTTCGACGCCCAGAGCTTC |
| | | ACATACTGGGGCCAAGGCACACAAGTGACA |
| | | GTCTCGTCTGCTAGCCACCATCACCATCAC |
| | | CAC |
| 375 | DNA | CAAGTGCAGCTGCAAGAGAGCGGAGGAGGA |
| | Sequence | AGCGTCCAAGCCGGAGGATCTCTGAGACTG |
| | Encoding | AGCTGCGCCGCTAGTGGCTACTCCTACAGC |
| | SEQ ID NO: | AGCTACTGCATGGGCTGGTTTAGGCAAGCC |
| | 277 | CCCGGCAAGGAGAGAGAAGGCGTGGCCACT |
| | | ATCGACAGCGACGGCATGACAAGGTACGCC |
| | | GACAGCGTGAAGGGAAGGTTCACAATCAGC |
| | | AAGGACAACGCCAAGAACACACTGTATCTG |
| | | CAGATGAACTCTCTGAAGCCAGAGGACACT |
| | | GCCATGTACTACTGTGCCGCTCCTCTGTAC |
| | | GACTGTGATAGCGGCGCTGTGGGCAGAAAT |
| | | CCACCTTATTGGGGCCAAGGCACTCAAGTG |
| | | ACAGTCTCGAGCGGCGGAGGATCCCAAGTG |
| | | CAGCTGCAAGAGAGCGGAGGAGGAAGCGTG |
| | | CAAGCCGGAGGCTCTCTGAGGCTGAGCTGT |
| | | GCCGCCTCTAGGTTCACATACAGCAGCTAC |
| | | TGCATGGGCTGGTTCAGACAAGCCCCCGGC |
| | | AAAGAGAGAGAAGGCGTGGCCAGCATCGAT |
| | | AGCGATGGCTCCACTAGCTACACTGACAGC |
| | | GTGAAGGGAAGGTTCACTATCAGCAAGGAC |
| | | AACGCCAAGAACACTCTGTATCTGCAGATG |
| | | AACTCTCTGAAGCCAGAGGACACAGCCATG |
| | | TACTACTGTGCCCTCGATCTGATGAGCACA |
| | | GTGGTGCCCGGCTTCTGTGGCTTTCTGCTG |
| | | AGCGCTGGCATGGATTACTGGGGCAAGGGC |
| | | ACTCAAGTGACTGTCTCGTCTGCTAGCCAC |
| | | CATCACCATCACCAC |
| 376 | DNA | CAAGTGCAGCTGCAAGAGAGCGGAGGAGGA |
| | Sequence | AGCGTCCAAGCCGGAGGATCTCTGAGACTG |
| | Encoding | AGCTGCGCCGCTAGTGGCTACTCCTACAGC |
| | SEQ ID NO: | AGCTACTGCATGGGCTGGTTTAGGCAAGCC |
| | 278 | CCCGGCAAGGAGAGAGAAGGCGTGGCCACT |
| | | ATCGACAGCGACGGCATGACAAGGTACGCC |
| | | GACAGCGTGAAGGGAAGGTTCACAATCAGC |
| | | AAGGACAACGCCAAGAACACACTGTATCTG |
| | | CAGATGAACTCTCTGAAGCCAGAGGACACT |
| | | GCCATGTACTACTGTGCCGCTCCTCTGTAC |
| | | GACTGTGATAGCGGCGCTGTGGGCAGAAAT |
| | | CCACCTTATTGGGGCCAAGGCACTCAAGTG |
| | | ACAGTCTCGAGCGGCGGAGGATCCCAAGTG |
| | | CAGCTGCAAGAGTCCGGAGGAGGCAGCGTC |
| | | CAAGCCGGAGGCTCTCTGAGGCTGAGCTGT |
| | | GCTGCCAGCGGCTACACTTACAGCATGTAC |
| | | TGCATGGGCTGGTTCAGACAAGCCCCCGGC |
| | | AAGGAAAGAGAGGGCGTGGCCCAGATCAAT |
| | | AGCGATGGCAGCACAAGCTACGCCGACAGC |
| | | GTGAAGGGAAGGTTCACTATCTCCAAGGAC |
| | | AACGCCAAGAACACTCTGTATCTGCAGATG |
| | | AACTCTCTGAAGCCAGAGGACACTGCCATG |
| | | TACTACTGCGCTGCCGATTCTAGGGTGTAC |
| | | GGCGGCAGCTGGTATGAGAGGCTCTGCGGC |
| | | CCTTACACATACGAGTACAACTACTGGGGC |
| | | CAAGGCACACAAGTGACTGTCTCGTCTGCT |
| | | AGCCACCATCACCATCACCAC |
| 377 | DNA | CAAGTGCAGCTGCAAGAGAGCGGAGGAGGA |
| | Sequence | AGCGTCCAAGCCGGAGGATCTCTGAGACTG |
| | Encoding | AGCTGCGCCGCTAGTGGCTACTCCTACAGC |
| | SEQ ID NO: | AGCTACTGCATGGGCTGGTTTAGGCAAGCC |
| | 279 | CCCGGCAAGGAGAGAGAAGGCGTGGCCACT |
| | | ATCGACAGCGACGGCATGACAAGGTACGCC |
| | | GACAGCGTGAAGGGAAGGTTCACAATCAGC |
| | | AAGGACAACGCCAAGAACACACTGTATCTG |
| | | CAGATGAACTCTCTGAAGCCAGAGGACACT |
| | | GCCATGTACTACTGTGCCGCTCCTCTGTAC |
| | | GACTGTGATAGCGGCGCTGTGGGCAGAAAT |
| | | CCACCTTATTGGGGCCAAGGCACTCAAGTG |
| | | ACAGTCTCGAGCGGCGGAGGATCCCAAGTG |
| | | CAGCTGCAAGAGAGCGGCGGAGGAAGCGTG |
| | | CAAGCCGGAGGATCTCTGAGACTGAGCTGC |
| | | GCTGTGAGCGGCTACGCCTACTCCACATAC |
| | | TGCATGGGCTGGTTTAGGCAAGCCCCCGGC |
| | | AAAGAGAGAGAGGGCGTGGCTGCTATCGAT |
| | | AGCGGCGGCAGCACAAGCTACGCCGATAGC |
| | | GTGAAGGGAAGGTTCACAATCAGCAAGGAC |
| | | AACGCCAAGAACACACTGTATCTGAGGATG |
| | | AACTCTCTGAAGCCAGAGGACACAGCCATG |
| | | TACTACTGTGCTGCTGTGCCTCCTCCTCCA |
| | | GATGGCGGCAGCTGTCTGTTTCTGGGACCA |
| | | GAGATCAAGGTCAGCAAGGCCGATTTTAGG |
| | | TACTGGGGCCAAGGCACACAAGTGACAGTC |
| | | TCGTCTGCTAGCCACCATCACCATCACCAC |
| 378 | DNA | CAAGTGCAGCTGCAAGAGAGCGGAGGAGGA |
| | Sequence | AGCGTCCAAGCCGGAGGATCTCTGAGACTG |
| | Encoding | AGCTGCGCCGCTAGTGGCTACTCCTACAGC |
| | SEQ ID NO: | AGCTACTGCATGGGCTGGTTTAGGCAAGCC |
| | 280 | CCCGGCAAGGAGAGAGAAGGCGTGGCCACT |
| | | ATCGACAGCGACGGCATGACAAGGTACGCC |
| | | GACAGCGTGAAGGGAAGGTTCACAATCAGC |
| | | AAGGACAACGCCAAGAACACACTGTATCTG |
| | | CAGATGAACTCTCTGAAGCCAGAGGACACT |
| | | GCCATGTACTACTGTGCCGCTCCTCTGTAC |
| | | GACTGTGATAGCGGCGCTGTGGGCAGAAAT |
| | | CCACCTTATTGGGGCCAAGGCACTCAAGTG |
| | | ACAGTCTCGAGCGGCGGAGGATCCCAAGTG |
| | | CAGCTGCAAGAGAGCGGAGGAGGAAGCGTG |
| | | CAAGCCGGAGGCTCTCTGAGGCTGAGCTGT |
| | | ACAGTGTCCGGCTACACTTACAGCTCCAAT |
| | | TGCATGGGCTGGTTTAGGCAAGCCCCCGGC |
| | | AAGGAAAGAGAGGGCGTGGCCACTATCTAC |
| | | ACTGGCGGCGGCAACACATACTACGCCGAT |
| | | AGCGTGAAGGGAAGGTTCACTATCAGCCAA |
| | | GATAACGCCAAGAACACAGTGTATCTGCAG |
| | | ATGAACAATCTGAAGCCAGAGGACACTGCC |
| | | ATGTACTACTGTGCTGCTGAGCCACTGTCT |
| | | AGGGTGTACGGCGGCAGCTGCCCAACTCCT |
| | | ACATTCGACTACTGGGGCCAAGGCACACAA |
| | | GTGACTGTCTCGTCTGCTAGCCACCATCAC |
| | | CATCACCAC |
| 379 | DNA | CAAGTGCAGCTGCAAGAGAGCGGAGGAGGA |
| | Sequence | AGCGTCCAAGCCGGAGGATCTCTGAGACTG |
| | Encoding | AGCTGCGCCGCTAGTGGCTACTCCTACAGC |
| | SEQ ID NO: | AGCTACTGCATGGGCTGGTTTAGGCAAGCC |
| | 281 | CCCGGCAAGGAGAGAGAAGGCGTGGCCACT |
| | | ATCGACAGCGACGGCATGACAAGGTACGCC |
| | | GACAGCGTGAAGGGAAGGTTCACAATCAGC |
| | | AAGGACAACGCCAAGAACACACTGTATCTG |
| | | CAGATGAACTCTCTGAAGCCAGAGGACACT |
| | | GCCATGTACTACTGTGCCGCTCCTCTGTAC |
| | | GACTGTGATAGCGGCGCTGTGGGCAGAAAT |
| | | CCACCTTATTGGGGCCAAGGCACTCAAGTG |
| | | ACAGTCTCGAGCGGCGGAGGATCCCAAGTG |
| | | CAGCTGCAAGAGAGCGGAGGAGGAAGCGTC |
| | | CAAGCCGGAGGCTCTCTGAGGCTGAGCTGT |
| | | GGAGCCAGCGGCTACACTTACAGCAGCTAC |
| | | TGTATGGGCTGGTTTAGGCAAGTGCCCGGC |
| | | AAGGAGAGAGAGGGCGTGGCCGTGATCGAT |
| | | TCCGATGGCAGCACAAGCTACGCTGACAGC |
| | | GTGAAGGGAAGGTTCACAATCAGCAAGGAC |
| | | AACGGCAAGAACACACTCTATCTGCAGATG |
| | | AACAGCCTCAAGCCAGAGGACACAGCCATG |
| | | TACTACTGCGCCGCTGATCTGGGCCACTAT |
| | | AGGCCTCCTTGTGGCGTGCTGTATCTGGGC |
| | | ATGGATTACTGGGGCAAGGGCACACAAGTG |
| | | ACAGTCTCGTCTGCTAGCCACCATCACCAT |
| | | CACCAC |
| 380 | DNA | CAAGTGCAGCTGCAAGAGAGCGGAGGAGGA |
| | Sequence | AGCGTCCAAGCCGGAGGATCTCTGAGACTG |
| | Encoding | AGCTGCGCCGCTAGTGGCTACTCCTACAGC |
| | SEQ ID NO: | AGCTACTGCATGGGCTGGTTTAGGCAAGCC |
| | 282 | CCCGGCAAGGAGAGAGAAGGCGTGGCCACT |
| | | ATCGACAGCGACGGCATGACAAGGTACGCC |
| | | GACAGCGTGAAGGGAAGGTTCACAATCAGC |
| | | AAGGACAACGCCAAGAACACACTGTATCTG |
| | | CAGATGAACTCTCTGAAGCCAGAGGACACT |
| | | GCCATGTACTACTGTGCCGCTCCTCTGTAC |
| | | GACTGTGATAGCGGCGCTGTGGGCAGAAAT |
| | | CCACCTTATTGGGGCCAAGGCACTCAAGTG |
| | | ACAGTCTCGAGCGGCGGAGGATCCCAAGTG |
| | | CAGCTGCAAGAGAGCGGAGGAGGAAGCGTC |
| | | CAAGCCGGAGGCTCTCTGAGACTGAGCTGT |
| | | GCCGCCAGCGGCTACTCCAACTGCAGCTAC |
| | | GACATGACTTGGTATAGGCAAGCCCCCGGC |
| | | AAGGAGAGGGAGTTCGTGTCCGCCATCCAC |
| | | AGCGACGGCAGCACTAGATACGCCGACAGC |
| | | GTGAAGGGAAGGTTCTTCATCAGCCAAGAT |
| | | AACGCCAAGAACACAGTGTATCTGCAGATG |
| | | AACTCCCTCAAGCCAGAGGACACTGCCATG |
| | | TACTACTGCAAGACAGACCCACTGCACTGC |
| | | AGAGCCCATGGCGGCAGCTGGTATAGCGTG |
| | | AGGGCCAACTACTGGGGCCAAGGCACACAA |
| | | GTGACAGTCTCGTCTGCTAGCCACCATCAC |
| | | CATCACCAC |
| 381 | DNA | CAAGTGCAGCTGCAAGAGAGCGGAGGCGGC |
| | Sequence | AGCGTGCAGACTGGAGGCTCTCTGAGACTG |
| | Encoding | AGCTGTGCTGCCAGCGGCTACACTTATCTG |
| | SEQ ID NO: | AGGGGCTGTATGGGCTGGTTTAGGCAAGCC |
| | 283 | CCCGGCAAGGAGAGAGAGGGCGTGGCCGTC |
| | | ATGGATGTGGTGGGCGATAGGAGAAGCTAC |
| | | ATCGACAGCGTGAAGGGAAGGTTCACAATC |
| | | TCTAGGGACAATGCCGCCAACAGCGTCTAT |
| | | CTGCAGATGGACAATCTGAAGCCAGAGGAC |
| | | ACAGCCATGTACTACTGCACTGCCGGCCCT |
| | | AACTGTGTGGGCTGGAGAAGCGGACTGGAT |
| | | TACTGGGGCCAAGGCACACAAGTGACAGTC |
| | | TCGAGCGGCGGAGGATCCCAAGTGCAGCTG |
| | | CAAGAGAGCGGAGGAGGAAGCGTGCAAGCC |
| | | GGAGGCTCTCTGAGACTGAGCTGTGCCGCC |
| | | TCTAGGTATCTGTACAGCATCGACTACATG |
| | | GCTTGGTTCAGACAGAGCCCCGGCAAGGAG |
| | | AGGGAGCCAGTGGCTGTCATCTACACTGCC |
| | | TCCGGCGCCACATTCTATCCAGATAGCGTG |
| | | AAGGGAAGGTTCACTATCAGCCAAGATAAC |
| | | GCCAAGATGACAGTGTATCTGCAGATGAAC |
| | | TCTCTGAAGAGCGAGGACACTGCCATGTAC |
| | | TACTGTGCCGCCGTGAGGAAGACAGATAGC |
| | | TACCTCTTCGACGCCCAGAGCTTCACATAC |
| | | TGGGGCCAAGGCACACAAGTGACAGTCTCG |
| | | TCTGCTAGCCACCATCACCATCACCAC |
| 382 | DNA | CAAGTGCAGCTGCAAGAGAGCGGAGGCGGC |
| | Sequence | AGCGTGCAGACTGGAGGCTCTCTGAGACTG |
| | Encoding | AGCTGTGCTGCCAGCGGCTACACTTATCTG |
| | SEQ ID NO: | AGGGGCTGTATGGGCTGGTTTAGGCAAGCC |
| | 284 | CCCGGCAAGGAGAGAGAGGGCGTGGCCGTC |
| | | ATGGATGTGGTGGGCGATAGGAGAAGCTAC |
| | | ATCGACAGCGTGAAGGGAAGGTTCACAATC |
| | | TCTAGGGACAATGCCGCCAACAGCGTCTAT |
| | | CTGCAGATGGACAATCTGAAGCCAGAGGAC |
| | | ACAGCCATGTACTACTGCACTGCCGGCCCT |
| | | AACTGTGTGGGCTGGAGAAGCGGACTGGAT |
| | | TACTGGGGCCAAGGCACACAAGTGACAGTC |
| | | TCGAGCGGCGGAGGATCCCAAGTGCAGCTG |
| | | CAAGAGAGCGGAGGAGGAAGCGTGCAAGCC |
| | | GGAGGCTCTCTGAGGCTGAGCTGTGCCGCC |
| | | TCTAGGTTCACATACAGCAGCTACTGCATG |
| | | GGCTGGTTCAGACAAGCCCCCGGCAAAGAG |
| | | AGAGAAGGCGTGGCCAGCATCGATAGCGAT |
| | | GGCTCCACTAGCTACACTGACAGCGTGAAG |
| | | GGAAGGTTCACTATCAGCAAGGACAACGCC |
| | | AAGAACACTCTGTATCTGCAGATGAACTCT |
| | | CTGAAGCCAGAGGACACAGCCATGTACTAC |
| | | TGTGCCCTCGATCTGATGAGCACAGTGGTG |
| | | CCCGGCTTCTGTGGCTTTCTGCTGAGCGCT |
| | | GGCATGGATTACTGGGGCAAGGGCACTCAA |
| | | GTGACTGTCTCGTCTGCTAGCCACCATCAC |
| | | CATCACCAC |
| 383 | DNA | CAAGTGCAGCTGCAAGAGAGCGGAGGCGGC |
| | Sequence | AGCGTGCAGACTGGAGGCTCTCTGAGACTG |
| | Encoding | AGCTGTGCTGCCAGCGGCTACACTTATCTG |
| | SEQ ID NO: | AGGGGCTGTATGGGCTGGTTTAGGCAAGCC |
| | 285 | CCCGGCAAGGAGAGAGAGGGCGTGGCCGTC |
| | | ATGGATGTGGTGGGCGATAGGAGAAGCTAC |
| | | ATCGACAGCGTGAAGGGAAGGTTCACAATC |
| | | TCTAGGGACAATGCCGCCAACAGCGTCTAT |
| | | CTGCAGATGGACAATCTGAAGCCAGAGGAC |
| | | ACAGCCATGTACTACTGCACTGCCGGCCCT |
| | | AACTGTGTGGGCTGGAGAAGCGGACTGGAT |
| | | TACTGGGGCCAAGGCACACAAGTGACAGTC |
| | | TCGAGCGGCGGAGGATCCCAAGTGCAGCTG |
| | | CAAGAGTCCGGAGGAGGCAGCGTCCAAGCC |
| | | GGAGGCTCTCTGAGGCTGAGCTGTGCTGCC |
| | | AGCGGCTACACTTACAGCATGTACTGCATG |
| | | GGCTGGTTCAGACAAGCCCCCGGCAAGGAA |
| | | AGAGAGGGCGTGGCCCAGATCAATAGCGAT |
| | | GGCAGCACAAGCTACGCCGACAGCGTGAAG |
| | | GGAAGGTTCACTATCTCCAAGGACAACGCC |
| | | AAGAACACTCTGTATCTGCAGATGAACTCT |
| | | CTGAAGCCAGAGGACACTGCCATGTACTAC |
| | | TGCGCTGCCGATTCTAGGGTGTACGGCGGC |
| | | AGCTGGTATGAGAGGCTCTGCGGCCCTTAC |
| | | ACATACGAGTACAACTACTGGGGCCAAGGC |
| | | ACACAAGTGACTGTCTCGTCTGCTAGCCAC |
| | | CATCACCATCACCAC |
| 384 | DNA | CAAGTGCAGCTGCAAGAGAGCGGAGGCGGC |
| | Sequence | AGCGTGCAGACTGGAGGCTCTCTGAGACTG |
| | Encoding | AGCTGTGCTGCCAGCGGCTACACTTATCTG |
| | SEQ ID NO: | AGGGGCTGTATGGGCTGGTTTAGGCAAGCC |
| | 286 | CCCGGCAAGGAGAGAGAGGGCGTGGCCGTC |
| | | ATGGATGTGGTGGGCGATAGGAGAAGCTAC |
| | | ATCGACAGCGTGAAGGGAAGGTTCACAATC |
| | | TCTAGGGACAATGCCGCCAACAGCGTCTAT |
| | | CTGCAGATGGACAATCTGAAGCCAGAGGAC |
| | | ACAGCCATGTACTACTGCACTGCCGGCCCT |
| | | AACTGTGTGGGCTGGAGAAGCGGACTGGAT |
| | | TACTGGGGCCAAGGCACACAAGTGACAGTC |
| | | TCGAGCGGCGGAGGATCCCAAGTGCAGCTG |
| | | CAAGAGAGCGGCGGAGGAAGCGTGCAAGCC |
| | | GGAGGATCTCTGAGACTGAGCTGCGCTGTG |
| | | AGCGGCTACGCCTACTCCACATACTGCATG |
| | | GGCTGGTTTAGGCAAGCCCCCGGCAAAGAG |
| | | AGAGAGGGCGTGGCTGCTATCGATAGCGGC |
| | | GGCAGCACAAGCTACGCCGATAGCGTGAAG |
| | | GGAAGGTTCACAATCAGCAAGGACAACGCC |
| | | AAGAACACACTGTATCTGAGGATGAACTCT |
| | | CTGAAGCCAGAGGACACAGCCATGTACTAC |
| | | TGTGCTGCTGTGCCTCCTCCTCCAGATGGC |
| | | GGCAGCTGTCTGTTTCTGGGACCAGAGATC |
| | | AAGGTCAGCAAGGCCGATTTTAGGTACTGG |
| | | GGCCAAGGCACACAAGTGACAGTCTCGTCT |
| | | GCTAGCCACCATCACCATCACCAC |
| 385 | DNA | CAAGTGCAGCTGCAAGAGAGCGGAGGCGGC |
| | Sequence | AGCGTGCAGACTGGAGGCTCTCTGAGACTG |
| | Encoding | AGCTGTGCTGCCAGCGGCTACACTTATCTG |
| | SEQ ID NO: | AGGGGCTGTATGGGCTGGTTTAGGCAAGCC |
| | 287 | CCCGGCAAGGAGAGAGAGGGCGTGGCCGTC |
| | | ATGGATGTGGTGGGCGATAGGAGAAGCTAC |
| | | ATCGACAGCGTGAAGGGAAGGTTCACAATC |
| | | TCTAGGGACAATGCCGCCAACAGCGTCTAT |
| | | CTGCAGATGGACAATCTGAAGCCAGAGGAC |
| | | ACAGCCATGTACTACTGCACTGCCGGCCCT |
| | | AACTGTGTGGGCTGGAGAAGCGGACTGGAT |
| | | TACTGGGGCCAAGGCACACAAGTGACAGTC |
| | | TCGAGCGGCGGAGGATCCCAAGTGCAGCTG |
| | | CAAGAGAGCGGAGGAGGAAGCGTGCAAGCC |
| | | GGAGGCTCTCTGAGGCTGAGCTGTACAGTG |
| | | TCCGGCTACACTTACAGCTCCAATTGCATG |
| | | GGCTGGTTTAGGCAAGCCCCCGGCAAGGAA |
| | | AGAGAGGGCGTGGCCACTATCTACACTGGC |
| | | GGCGGCAACACATACTACGCCGATAGCGTG |
| | | AAGGGAAGGTTCACTATCAGCCAAGATAAC |
| | | GCCAAGAACACAGTGTATCTGCAGATGAAC |
| | | AATCTGAAGCCAGAGGACACTGCCATGTAC |
| | | TACTGTGCTGCTGAGCCACTGTCTAGGGTG |
| | | TACGGCGGCAGCTGCCCAACTCCTACATTC |
| | | GACTACTGGGGCCAAGGCACACAAGTGACT |
| | | GTCTCGTCTGCTAGCCACCATCACCATCAC |
| | | CAC |
| 386 | DNA | CAAGTGCAGCTGCAAGAGAGCGGAGGCGGC |
| | Sequence | AGCGTGCAGACTGGAGGCTCTCTGAGACTG |
| | Encoding | AGCTGTGCTGCCAGCGGCTACACTTATCTG |
| | SEQ ID NO: | AGGGGCTGTATGGGCTGGTTTAGGCAAGCC |
| | 288 | CCCGGCAAGGAGAGAGAGGGCGTGGCCGTC |
| | | ATGGATGTGGTGGGCGATAGGAGAAGCTAC |
| | | ATCGACAGCGTGAAGGGAAGGTTCACAATC |
| | | TCTAGGGACAATGCCGCCAACAGCGTCTAT |
| | | CTGCAGATGGACAATCTGAAGCCAGAGGAC |
| | | ACAGCCATGTACTACTGCACTGCCGGCCCT |
| | | AACTGTGTGGGCTGGAGAAGCGGACTGGAT |
| | | TACTGGGGCCAAGGCACACAAGTGACAGTC |
| | | TCGAGCGGCGGAGGATCCCAAGTGCAGCTG |
| | | CAAGAGAGCGGAGGAGGAAGCGTCCAAGCC |
| | | GGAGGCTCTCTGAGGCTGAGCTGTGGAGCC |
| | | AGCGGCTACACTTACAGCAGCTACTGTATG |
| | | GGCTGGTTTAGGCAAGTGCCCGGCAAGGAG |
| | | AGAGAGGGCGTGGCCGTGATCGATTCCGAT |
| | | GGCAGCACAAGCTACGCTGACAGCGTGAAG |
| | | GGAAGGTTCACAATCAGCAAGGACAACGGC |
| | | AAGAACACACTCTATCTGCAGATGAACAGC |
| | | CTCAAGCCAGAGGACACAGCCATGTACTAC |
| | | TGCGCCGCTGATCTGGGCCACTATAGGCCT |
| | | CCTTGTGGCGTGCTGTATCTGGGCATGGAT |
| | | TACTGGGGCAAGGGCACACAAGTGACAGTC |
| | | TCGTCTGCTAGCCACCATCACCATCACCAC |
| 387 | DNA | CAAGTGCAGCTGCAAGAGAGCGGAGGCGGC |
| | Sequence | AGCGTGCAGACTGGAGGCTCTCTGAGACTG |
| | Encoding | AGCTGTGCTGCCAGCGGCTACACTTATCTG |
| | SEQ ID NO: | AGGGGCTGTATGGGCTGGTTTAGGCAAGCC |
| | 289 | CCCGGCAAGGAGAGAGAGGGCGTGGCCGTC |
| | | ATGGATGTGGTGGGCGATAGGAGAAGCTAC |
| | | ATCGACAGCGTGAAGGGAAGGTTCACAATC |
| | | TCTAGGGACAATGCCGCCAACAGCGTCTAT |
| | | CTGCAGATGGACAATCTGAAGCCAGAGGAC |
| | | ACAGCCATGTACTACTGCACTGCCGGCCCT |
| | | AACTGTGTGGGCTGGAGAAGCGGACTGGAT |
| | | TACTGGGGCCAAGGCACACAAGTGACAGTC |
| | | TCGAGCGGCGGAGGATCCCAAGTGCAGCTG |
| | | CAAGAGAGCGGAGGAGGAAGCGTCCAAGCC |
| | | GGAGGCTCTCTGAGACTGAGCTGTGCCGCC |
| | | AGCGGCTACTCCAACTGCAGCTACGACATG |
| | | ACTTGGTATAGGCAAGCCCCCGGCAAGGAG |
| | | AGGGAGTTCGTGTCCGCCATCCACAGCGAC |
| | | GGCAGCACTAGATACGCCGACAGCGTGAAG |
| | | GGAAGGTTCTTCATCAGCCAAGATAACGCC |
| | | AAGAACACAGTGTATCTGCAGATGAACTCC |
| | | CTCAAGCCAGAGGACACTGCCATGTACTAC |
| | | TGCAAGACAGACCCACTGCACTGCAGAGCC |
| | | CATGGCGGCAGCTGGTATAGCGTGAGGGCC |
| | | AACTACTGGGGCCAAGGCACACAAGTGACA |
| | | GTCTCGTCTGCTAGCCACCATCACCATCAC |
| | | CAC |
| 388 | SEQ ID NO: | IDYMA |
| | 44 CDR 1 | |
| 389 | SEQ ID NO: | VIYTASGATFYPDSVKG |
| | 44 CDR 2 | |
| 390 | SEQ ID NO: | VRKTDSYLFDAQSFTY |
| | 44 CDR 3 | |
| 391 | SEQ ID NO: | SYCMG |
| | 45 CDR 1 | |
| 392 | SEQ ID NO: | SIDSDGSTSYTDSVKG |
| | 45 CDR 2 | |
| 393 | SEQ ID NO: | DLMSTVVPGFCGFLLSAGMDY |
| | 45 CDR 3 | |
| 394 | SEQ ID NO: | MYCMG |
| | 46 CDR 1 | |
| 395 | SEQ ID NO: | QINSDGSTSYADSVKG |
| | 46 CDR 2 | |
| 396 | SEQ ID NO: | DSRVYGGSWYERLCGPYTYEYNY |
| | 46 CDR 3 | |
| 397 | SEQ ID NO: | TYCMG |
| | 47 CDR 1 | |
| 398 | SEQ ID NO: | AIDSGGSTSYADSVKG |
| | 47 CDR 2 | |
| 399 | SEQ ID NO: | VPPPPDGGSCLFLGPEIK VSKADFRY |
| | 47 CDR 3 | |
| 400 | SEQ ID NO: | SNCMG |
| | 48 CDR 1 | |
| 401 | SEQ ID NO: | TIYTGGGNTYYADSVKG |
| | 48 CDR 2 | |
| 402 | SEQ ID NO: | EPLSRVYGGSCPTPTFDY |
| | 48 CDR 3 | |
| 403 | SEQ ID NO: | SYCMG |
| | 49 CDR 1 | |
| 404 | SEQ ID NO: | VIDSDGSTSYADSVKG |
| | 49 CDR 2 | |
| 405 | SEQ ID NO: | DLGHYRPPCGVLYLGMDY |
| | 49 CDR 3 | |
| 406 | SEQ ID NO: | SYDMT |
| | 50 CDR 1 | |
| 407 | SEQ ID NO: | AIHSDGSTRYADSVKG |
| | 50 CDR 2 | |
| 408 | SEQ ID NO: | DPLHCRAHGGSWYSVRANY |
| | 50 CDR 3 | |
| 409 | SEQ ID NO: | SGCMG |
| | 51 CDR 1 | |
| 410 | SEQ ID NO: | AINSDGSTSYADSVKG |
| | 51 CDR 2 | |
| 411 | SEQ ID NO: | EPYCSGGYPR |
| | 51 CDR 3 | |
| 412 | SEQ ID NO: | SYCMG |
| | 52 CDR 1 | |
| 413 | SEQ ID NO: | HIDSDGSTSYADSVKG |
| | 52 CDR 2 | |
| 414 | SEQ ID NO: | DPIPGPGYCDGGPNKY |
| | 52 CDR 3 | |
| 415 | SEQ ID NO: | SYCMG |
| | 53 CDR 1 | |
| 416 | SEQ ID NO: | TIDSDGMTRYADSVKG |
| | 53 CDR 2 | |
| 417 | SEQ ID NO: | DADCTIAAMTTNPL |
| | 53 CDR 3 | |
| 418 | SEQ ID NO: | VNYMG |
| | 54 CDR 1 | |
| 419 | SEQ ID NO: | TIFTGAGTTYYANSVKG |
| | 54 CDR 2 | |
| 420 | SEQ ID NO: | DFRGGLLYRPAYEYTYR |
| | 54 CDR 3 | |
| 421 | SEQ ID NO: | VNYMG |
| | 55 CDR 1 | |
| 422 | SEQ ID NO: | TIFTGAGTTYYANSVKG |
| | 55 CDR 2 | |
| 423 | SEQ ID NO: | DFRGGLLYRPAYEYTYR |
| | 55 CDR 3 | |
| 424 | SEQ ID NO: | SYCMG |
| | 56 CDR 1 | |
| 425 | SEQ ID NO: | TIDSDGMTRYADSVKG |
| | 56 CDR 2 | |
| 426 | SEQ ID NO: | PLYDCDSGAVGRNPPY |
| | 56 CDR 3 | |
| 427 | SEQ ID NO: | RGCMG |
| | 57 CDR 1 | |
| 428 | SEQ ID NO: | VMDVVGDRRSYIDSVKG |
| | 57 CDR 2 | |
| 429 | SEQ ID NO: | GPNCVGWRSGLDY |
| | 57 CDR 3 | |
| 430 | ASH6 | ASHHHHHH |
| | purification | |
| | handle | |

[0211] It is understood that the embodiments described herein are for illustrative purposes only and that various modifications or changes in light thereof will be suggested to persons skilled in the art and are to be included within the spirit and purview of this application and scope of the appended claims. The sequences of the sequence accession numbers cited herein are hereby incorporated by reference.

What is claimed is:

1. An IL12 receptor (IL12R) binding protein that specifically binds to IL12Rβ1 and IL12Rβ2,
wherein the binding protein causes the multimerization of IL12Rβ1 and IL12Rβ2 and downstream signaling, and
wherein the binding protein comprises a single-domain antibody (sdAb) that specifically binds to IL12Rβ1 (an anti-IL12Rβ1 sdAb) and a sdAb that specifically binds to IL12Rβ2 (an anti-IL12Rβ2 sdAb).

2. The IL12R binding protein of claim 1, wherein the anti-IL12Rβ1 sdAb is a V_{H}H antibody (an anti-IL12Rβ1 V_{H}H antibody) and/or the anti-IL12Rβ2 sdAb is a V_{H}H antibody (an anti-IL12Rβ2 V_{H}H antibody).

3. The IL12R binding protein of claim 1 or 2, wherein the anti-IL12Rβ1 sdAb and the anti-IL12Rβ2 sdAb are joined by a peptide linker.

4. The IL12R binding protein of claim 3, wherein the peptide linker comprises between 1 and 50 amino acids.

5. The IL12R binding protein of any one of claims 1 to 4, wherein the IL12R binding protein has a reduced Eₘₐₓ compared to IL12.

6. The IL12R binding protein of any one of claims 1 to 5, wherein the IL12R binding protein has a similar potency compared to that of IL12.

7. A method for treating cancer in a subject in need thereof, comprising administering to the subject the IL12R binding protein of any one of claims 1 to 6, wherein the IL12R binding protein binds to and activates natural killer, CD4⁺ T cells, and/or CD8⁺ T cells.

8. The method of claim 7, wherein the cancer is a solid tumor cancer.

9. An IL27 receptor (IL27R) binding protein that specifically binds to IL27Rα subunit (IL27Rα) and glycoprotein 130 subunit (gp130),
wherein the binding protein causes the multimerization of IL27Rα and gp130 and downstream signaling, and
wherein the binding protein comprises a single-domain antibody (sdAb) that specifically binds to IL27Rα (an anti-IL27Rα sdAb) and a sdAb that specifically binds to gp130 (an anti-gp130 sdAb).

10. The IL27R binding protein of claim 9, wherein the anti-IL27Rα sdAb is a V_{H}H antibody (an anti-IL27Rα V_{H}H antibody) and/or the anti-gp130 sdAb is a V_{H}H antibody (an anti-gp130 V_{H}H antibody).

11. The IL27R binding protein of any one of claims 9 to 10, wherein the anti-IL27Rα sdAb and the anti-gp130 sdAb are joined by a peptide linker.

12. The IL27R binding protein of claim 11, wherein the peptide linker comprises between 1 and 50 amino acids.

13. A method for treating cancer in a subject in need thereof, comprising administering to the subject the IL27R binding protein of any one of claims 9 to 12, wherein the IL27R binding protein binds to and activates CD8⁺ T cells, CD4⁺ T cells, and/or T-regulatory (Treg) cells.

14. The method of claim 13, wherein the IL27R binding protein binds to and activates CD8⁺ T cells.

15. The method of claim 13 or 14, wherein the IL27R binding protein binds to and activates CXCR5⁺ CD8⁺ T cells.

16. The method of any one of claims 13 to 15, wherein the cancer is a solid tumor cancer.

17. An IL10 receptor (IL10R) binding protein that specifically binds to IL10Rα subunit (IL10Rα) and IL10Rβ,
wherein the binding protein causes the multimerization of IL10Rα and IL10Rβ and downstream signaling, and
wherein the binding protein comprises a single-domain antibody (sdAb) that specifically binds to IL10Rα (an anti-IL10Rα sdAb) and a sdAb that specifically binds to IL10Rβ (an anti-IL10Rβ sdAb).

18. The IL10R binding protein of claim 17, wherein the anti-IL10Rα sdAb is a V_{H}H antibody (an anti-IL10Rα V_{H}H antibody) and/or the anti-IL10Rβ sdAb is a V_{H}H antibody (an anti-IL10Rβ V_{H}H antibody).

19. The IL10R binding protein of any one of claims 17 to 18, wherein the anti-IL10Rα sdAb and the anti-IL10Rβ sdAb are joined by a peptide linker.

20. The IL10R binding protein of claim 19, wherein the peptide linker comprises between 1 and 50 amino acids.

21. A method for treating cancer in a subject in need thereof, comprising administering to the subject the IL10R binding protein of any one of claims 17 to 20, wherein the IL10R binding protein binds to and activates CD8⁺ T cells, CD4⁺ T cells, macrophages, and/or Treg cells.

22. The method of claim 21, wherein the IL10R binding protein provides longer therapeutic efficacy than a pegylated IL10.

23. The method of claim 21 or 22, wherein the cancer is a solid tumor cancer.

24. An interferon (IFN) λ receptor (IFNλR) binding protein that specifically binds to IL10Rβ and IL28 receptor (IL28R) α subunit (IL28Rα),
wherein the binding protein causes the multimerization of IL10Rβ and IL28Rα and downstream signaling, and
wherein the binding protein comprises a single-domain antibody (sdAb) that specifically binds to IL10Rβ (an anti-IL10Rβ sdAb) and a sdAb that specifically binds to IL28Rα (an anti-IL28Rα sdAb).

25. The IFNλR binding protein of claim 24, wherein the anti-IL10Rβ sdAb is a V_{H}H antibody (an anti-IL10Rβ V_{H}H antibody) and/or the anti-IL28Rα sdAb is a V_{H}H antibody (an anti-IL28Rα V_{H}H antibody).

26. The IFNλR binding protein of any one of claims 24 to 25, wherein the anti-IL10Rβ sdAb and the anti-IL28Rα sdAb are joined by a peptide linker.

27. The IFNλR binding protein of claim 26, wherein the peptide linker comprises between 1 and 50 amino acids.

28. A method for treating an infectious disease in a subject in need thereof, comprising administering to the subject an IFNλR binding protein of any one of claims 24 to 27, wherein the IFNλR binding protein binds to and activates macrophages, CD8⁺ T cells, CD4⁺ T cells, Treg cells, dendritic cells, and/or epithelial cells.

29. The method of claim 28, wherein the IFNλR binding protein binds to and activates macrophages.

30. The method of claim 28 or 29, wherein the infectious disease is influenza, hepatitis B, hepatitis C, or human immunodeficiency virus (HIV) infection.

31. A binding protein that specifically binds to IL10Rα and IL2Rγ,
wherein the binding protein causes the multimerization of IL10Rα and IL2Rγ and downstream signaling, and
wherein the binding protein comprises a sdAb that specifically binds to IL10Rα (an anti-IL10Rα sdAb) and a sdAb that specifically binds to IL2Rγ (an anti-IL2Rγ sdAb).

32. The binding protein of claim 31, wherein the anti-IL10Rα sdAb is a V_{H}H antibody (an anti-IL10Rα V_{H}H antibody) and/or the anti-IL2Rγ sdAb is a V_{H}H antibody (an anti-IL2Rγ V_{H}H antibody).

33. The binding protein of any one of claims 31 to 32, wherein the anti-IL10Rα sdAb and the anti-IL2Rγ sdAb are joined by a peptide linker.

34. The binding protein of claim 33, wherein the peptide linker comprises between 1 and 50 amino acids.

35. A method for treating cancer in a subject in need thereof, comprising administering to the subject the binding protein of any one of claims 31 to 34, wherein the binding protein binds to and activates CD8⁺ T cells and/or CD4⁺ T cells.

36. The method of claim 35, wherein the method does not cause anemia.

37. A binding protein that specifically binds to a first receptor and a second receptor,
wherein the first receptor is interferon γ receptor 1 (IFNγR1) or IL28Rα and the second receptor is preferentially expressed on myeloid cells and/or T cells,
wherein the binding protein causes the multimerization of the first receptor and the second receptor and their downstream signaling, and
wherein the binding protein comprises a single-domain antibody (sdAb) that specifically binds to the first receptor and a sdAb that specifically binds to the second receptor.

38. The binding protein of claim 37, wherein the sdAb that specifically binds to the first receptor is an anti-IFNγR1 V_{H}H antibody.

39. The binding protein of claim 37, wherein the sdAb that specifically binds to the first receptor is an anti-IL28Rα V_{H}H antibody.

40. The binding protein of any one of claims 37 to 39, wherein the first receptor is IFNγR1 and the second receptor is IL2Rγ.

41. The binding protein of any one of claims 37 to 39, wherein the first receptor is IL28Rα and the second receptor is IL2Rγ.

42. The binding protein of any one of claims 37 to 41, wherein the sdAb that specifically binds to the first receptor and the sdAb that specifically binds to the second receptor are joined by a peptide linker.

43. The binding protein of claim 42, wherein the peptide linker comprises between 5 and 50 amino acids.

44. A method for treating cancer in a subject in need thereof, comprising administering to the subject the binding protein of any one of claims 37 to 43, wherein the binding protein binds to and activates myeloid cells and/or T cells.

45. The method of claim 44, wherein the binding protein binds to and activates macrophages.

46. The method of claim 44, wherein the binding protein binds to and activates CD8⁺ T cells and/or CD4⁺ T cells.

47. The IL10R binding protein of any one of claims 17 to 20 wherein the anti-IL10Rα sdAb is selected from the group consisting of SEQ ID NOs: 44-50 and the anti-IL10Rβ sdAb is selected from the group consisting of SEQ ID Nos: 51-57.

48. The IL10R binding protein of claim 47 wherein the anti-IL10Rα sdAb is joined to the anti-IL10Rβ sdAb via a linker selected from the group consisting of SEQ ID Nos: 1-23.

49. The ILR binding protein of claim 47 wherein the IL10R binding protein comprises, from amino to carboxy, a first anti-IL10R sdAb joined via a linker to a second anti-IL10R sdAb, according to the following:

| first anti-IL10R | second anti-IL10R |
|---|---|
| sdAb SEQ ID | sdAb SEQ ID |
| 48 | 57 |
| 49 | 56 |
| 50 | 55 |
| 52 | 46 |
| 47 | 51 |
| 51 | 47 |
| 46 | 55 |
| 46 | 56 |
| 47 | 56 |
| 46 | 54 |
| 44 | 53 |
| 55 | 44 |
| 46 | 52 |
| 45 | 57 |
| 45 | 55 |
| 47 | 55 |
| 50 | 54 |
| 48 | 55 |
| 46 | 57 |
| 47 | 57 |
| 50 | 56 |
| 49 | 51 |
| 52 | 45 |
| 53 | 44 |
| 54 | 47 |

and wherein said linker is selected from the group consisting of SEQ ID Nos:1-23.

50. The IL-10 receptor binding protein of claim 17 selected from the group consisting of SEQ ID Nos: 194, 209, 210, 211, 213, 218, 226, 233, 238, 244, 250, 203, 205, 207, 269, 212, 217, 219, 224, 227, 237, 239, and 249.

The application's sequence listing, which the Patent Office published only in electronic form, follows.

SEQUENCE LISTING (443 sequences)

SEQ ID NO: 1 - protein, 5 aa, Artificial Sequence
  Description of Artificial Sequence: Synthetic peptide
GGGGS

SEQ ID NO: 2 - protein, 6 aa, Artificial Sequence
  Description of Artificial Sequence: Synthetic peptide
GGGGGS

SEQ ID NO: 3 - protein, 4 aa, Artificial Sequence
  Description of Artificial Sequence: Synthetic peptide
GGSG

SEQ ID NO: 4 - protein, 4 aa, Artificial Sequence
  Description of Artificial Sequence: Synthetic peptide
SGGG

SEQ ID NO: 5 - protein, 4 aa, Artificial Sequence
  Description of Artificial Sequence: Synthetic peptide
GSGS

SEQ ID NO: 6 - protein, 6 aa, Artificial Sequence
  Description of Artificial Sequence: Synthetic peptide
GSGSGS

SEQ ID NO: 7 - protein, 10 aa, Artificial Sequence
  Description of Artificial Sequence: Synthetic peptide
GSGSGSGSGS

SEQ ID NO: 8 - protein, 12 aa, Artificial Sequence
  Description of Artificial Sequence: Synthetic peptide
GSGSGSGSGSGS

SEQ ID NO: 9 - protein, 6 aa, Artificial Sequence
  Description of Artificial Sequence: Synthetic peptide
GGSGGS

SEQ ID NO: 10 - protein, 9 aa, Artificial Sequence
  Description of Artificial Sequence: Synthetic peptide
GGSGGSGGS

SEQ ID NO: 11 - protein, 12 aa, Artificial Sequence
  Description of Artificial Sequence: Synthetic peptide
GGSGGSGGSGGS

SEQ ID NO: 12 - protein, 8 aa, Artificial Sequence
  Description of Artificial Sequence: Synthetic peptide
GGSGGGSG

SEQ ID NO: 13 - protein, 12 aa, Artificial Sequence
  Description of Artificial Sequence: Synthetic peptide
GGSGGGSGGGSG

SEQ ID NO: 14 - protein, 16 aa, Artificial Sequence
  Description of Artificial Sequence: Synthetic peptide
GGSGGGSGGGSGGGSG

SEQ ID NO: 15 - protein, 20 aa, Artificial Sequence
  Description of Artificial Sequence: Synthetic peptide
GGSGGGSGGGSGGGSGGGSG

SEQ ID NO: 16 - protein, 10 aa, Artificial Sequence
  Description of Artificial Sequence: Synthetic peptide
GGGGSGGGGS

SEQ ID NO: 17 - protein, 15 aa, Artificial Sequence
  Description of Artificial Sequence: Synthetic peptide
GGGGSGGGGSGGGGS

SEQ ID NO: 18 - protein, 5 aa, Artificial Sequence
  Description of Artificial Sequence: Synthetic peptide
GGSGG

SEQ ID NO: 19 - protein, 5 aa, Artificial Sequence
  Description of Artificial Sequence: Synthetic peptide
GSGSG

SEQ ID NO: 20 - protein, 5 aa, Artificial Sequence
  Description of Artificial Sequence: Synthetic peptide
GSGGG

SEQ ID NO: 21 - protein, 5 aa, Artificial Sequence
  Description of Artificial Sequence: Synthetic peptide
GGGSG

SEQ ID NO: 22 - protein, 5 aa, Artificial Sequence
  Description of Artificial Sequence: Synthetic peptide
GSSSG

SEQ ID NO: 23 - protein, 4 aa, Artificial Sequence
  Description of Artificial Sequence: Synthetic peptide
GGGS

SEQ ID NO: 24 - protein, 129 aa, Artificial Sequence
  Description of Artificial Sequence: Synthetic polypeptide
QVQLQESGGGSVQAGGSLRLSCTASGAIASGYIDSRWCMAWFRQAPGKEREGVAAIWPGGGLTVYADSVKGRFTISRDHAKNTLYLQMNNLKPEDTAMYYCAAGSPRMCPSLEFGFDYWGQGTQVTVSS

SEQ ID NO: 25 - protein, 119 aa, Artificial Sequence
  Description of Artificial Sequence: Synthetic polypeptide
QVQLQESGGGSVQAGGSLRLSCVASASTYCTYDMHWYRQAPGKGREFVSAIDSDGTTRYADSVKGRFTISQGTAKNTVYLQMNSLQPEDTAMYYCKTVCVVGSRWSDYWGQGTQVTVSS

SEQ ID NO: 26 - protein, 123 aa, Artificial Sequence
  Description of Artificial Sequence: Synthetic polypeptide
QVQLQESGGGSVQAGGSLRLSCTAPGFTSNSCGMDWYRQAPGKEREFVSSISTDGTTGYADSVKGRFTISKDKAKDTVYLQMNSLKPEDTGMYSCKTKDGTIATMELCDFGYWGQGTQVTVSS

SEQ ID NO: 27 - protein, 128 aa, Artificial Sequence
  Description of Artificial Sequence: Synthetic polypeptide
QVQLQESGGGSVQAGGSLRLSCAASGYPYSNGYMGWFRQAPGKEREGVATIYTGDGRTYYADSVKGRFTISRDNAKNTVDLQMSSLKPEDTAMYYCAARAAPLYSSGSPLTRARYNVWGQGTQVTVSS

SEQ ID NO: 28 - protein, 117 aa, Artificial Sequence
  Description of Artificial Sequence: Synthetic polypeptide
QVQLQESGGGSVQAGGSLTLSCAASEYAYSTCNMGWYRQAPGKERELVSAFISDGSTYYADSVKGRFTITRDNAKNTVYLQMNSLKPEDTAIYYCSANCYRRLRNYWGQGTQVTVSS

SEQ ID NO: 29 - protein, 124 aa, Artificial Sequence
  Description of Artificial Sequence: Synthetic polypeptide
QVQLQESGGGLVQPGGSLRLSCTASGLTFDDSVMGWFRQAPGKGREAVSCISSSGANAFYADSVKGRFTISRDNAKNTLYLQMNSLKPEDTATYYCKRGHACAGYYPIPYDDYWGQGTQVTVSS

SEQ ID NO: 30 - protein, 122 aa, Artificial Sequence
  Description of Artificial Sequence: Synthetic polypeptide
QVQLQESGGGSVQAGGSLRLSCAASGYEYCRIHMTWYRQGPGKEREFVSSIGSDGRKTYANSVTGRFTISRDNANHTVYLQMNSLSPEDTAMYYCKTEYLYGLGCPDGSAYWGQGTQVTVSS

SEQ ID NO: 31 - protein, 124 aa, Artificial Sequence
  Description of Artificial Sequence: Synthetic polypeptide
QVQLQESGGGSVQAGGSLRLSCAASEYTASRYCMAWFRQAPGKEREGVAAIHPGGGTTYYADSVKGRFSISQDSADNTLYLQMNSLKPEDTAMYYCAAGSLWVPFGDRCAANYWGQGTQVTVSS

SEQ ID NO: 32 - protein, 116 aa, Artificial Sequence
  Description of Artificial Sequence: Synthetic polypeptide
QVQLQESGGGLVQPGGSLRLSCVASGFTFSNYWIFWVRQAAGKGLEWLSTSNTGGDTTKYADSVKGRFTISRDSAKNTEYLQMNSLKPEDTAVYYCETGRCARSGGYQGTQVTVSS

SEQ ID NO: 33 - protein, 124 aa, Artificial Sequence
  Description of Artificial Sequence: Synthetic polypeptide
QVQLQESGGGSVQVGGSLRLSCATSGDTKSIRCMGWFRQTPGKEREGIAAIDREGFATYADSVYDRFTIAQDNAQNTLYLEMNALKPEDTAMYYCAAQNMCRVVRGAMTGVDYWGKGTQVTVSS

SEQ ID NO: 34 - protein, 125 aa, Artificial Sequence
  Description of Artificial Sequence: Synthetic polypeptide
QVQLQESGGGSVQVGGSLKLSCAASGYTYSSYYCMGWFRQAPGKEREGVAAIDSDGSTSYADSVKGRFTISQDDAKNTLYLQMNSLKPEDTAMYYCAASYEVVDCYPSGYGQDYWGKGTQVTVSS

SEQ ID NO: 35 - protein, 119 aa, Artificial Sequence
  Description of Artificial Sequence: Synthetic polypeptide
QVQLQESGGGSVQAGGSLRLSCVGSGYTYDTSDMSWYRQAPGKEREFVSDIDSGDWAAYADAVKGRFTISRDNAKKTVYLQMNSLEPEDTAMYYCKASYWKWGKLNNFWGPGTQVTVSS

SEQ ID NO: 36 - protein, 122 aa, Artificial Sequence
  Description of Artificial Sequence: Synthetic polypeptide
QVQLQESGGGLVQPGGSLKLSCAASGFRFSNYGMSWVRQAPGEGLEWVSYINGDGSRTHYADSVKGRFTISRDNAKNTLYLQLNSLKTEDTAMYYCEKGLSRDGWSLSAASRGQGTQVTVSS

SEQ ID NO: 37 - protein, 125 aa, Artificial Sequence
  Description of Artificial Sequence: Synthetic polypeptide
QVQLQESGGGSVQTGGSLRLSCAVSGYTTYSFNYMGWFRQAPGKEREGVAVIYTGGGSTLYADSVKGRFTISQDNAKNTVYLQMNSLKPEDTAMYYCAADDQRFASPLYAYFGYWGQGTQVTVSS

SEQ ID NO: 38 - protein, 117 aa, Artificial Sequence
  Description of Artificial Sequence: Synthetic polypeptide
QVQLQESGGGLVQPGGSLRLSCTASGFSFSSYPMTWARQAPGKGLEWVSTIASDGGSTAYAASVEGRFTISRDNAKSTLYLQLNSLKTEDTAMYYCTKGYGDGTPAPGQGTQVTVSS

SEQ ID NO: 39 - protein, 120 aa, Artificial Sequence
  Description of Artificial Sequence: Synthetic polypeptide
QVQLQESGGGLVQPGGSLRLSCAASGFTFSSAHMSWVRQAPGKGREWIASIYSGGGTFYADSVKGRFTISRDNAKNTLYLQLNSLKAEDTAMYYCATNRLHYYSDDDSLRGQGTQVTVSS

SEQ ID NO: 40 - protein, 121 aa, Artificial Sequence
  Description of Artificial Sequence: Synthetic polypeptide
QVQLQESGGGSVQAGGSLRLSCTASGFTFDDREMNWYRQAPGNECELVSTISSDGSTYYADSVKGRFTISQDNAKNTVYLQMDSVKPEDTAVYYCAADFMIAIQAPGAGCWGQGTQVTVSS

SEQ ID NO: 41 - protein, 119 aa, Artificial Sequence
  Description of Artificial Sequence: Synthetic polypeptide
QVQLQESGGGSVQAGGSLRLSCVASGYTSCMGWFRQAPGKEREAVATIYTRGRSIYYADSVKGRFTISQDNAKNTLYLQMNSLKPEDIAMYSCAAGGYSWSAGCEFNYWGQGTQVTVSS

SEQ ID NO: 42 - protein, 125 aa, Artificial Sequence
  Description of Artificial Sequence: Synthetic polypeptide
QVQLQESGGGSVQAGGSLRLSCTASGFTFDDSDMGWYRQAPGNECELVSTISSDGSTYYADSVKGRFTISQDNAKNTVYLQMNSLKPEDTAVYYCAAEPRGYYSNYGGRRECNYWGQGTQVTVSS

SEQ ID NO: 43 - protein, 127 aa, Artificial Sequence
  Description of Artificial Sequence: Synthetic polypeptide
QVQLQESGGGSVQAGGSLRLSCVASGYTFSSYCMGWFRQAPGKEREGVAALGGGSTYYADSVKGRFTISQDNAKNTLYLQMNSLKPEDTAMYYCAAAWVACLEFGGSWYDLARYKHWGQGTQVTVSS

SEQ ID NO: 44 - protein, 125 aa, Artificial Sequence
  Description of Artificial Sequence: Synthetic polypeptide
QVQLQESGGGSVQAGGSLRLSCAASRYLYSIDYMAWFRQSPGKEREPVAVIYTASGATFYPDSVKGRFTISQDNAKMTVYLQMNSLKSEDTAMYYCAAVRKTDSYLFDAQSFTYWGQGTQVTVSS

SEQ ID NO: 45 - protein, 129 aa, Artificial Sequence
  Description of Artificial Sequence: Synthetic polypeptide
QVQLQESGGGSVQAGGSLRLSCAASRFTYSSYCMGWFRQAPGKEREGVASIDSDGSTSYTDSVKGRFTISKDNAKNTLYLQMNSLKPEDTAMYYCALDLMSTVVPGFCGFLLSAGMDYWGKGTQVTVSS

SEQ ID NO: 46 - protein, 131 aa, Artificial Sequence
  Description of Artificial Sequence: Synthetic polypeptide
QVQLQESGGGSVQAGGSLRLSCAASGYTYSMYCMGWFRQAPGKEREGVAQINSDGSTSYADSVKGRFTISKDNAKNTLYLQMNSLKPEDTAMYYCAADSRVYGGSWYERLCGPYTYEYNYWGQGTQVTVSS

SEQ ID NO: 47 - protein, 134 aa, Artificial Sequence
  Description of Artificial Sequence: Synthetic polypeptide
QVQLQESGGGSVQAGGSLRLSCAVSGYAYSTYCMGWFRQAPGKEREGVAAIDSGGSTSYADSVKGRFTISKDNAKNTLYLRMNSLKPEDTAMYYCAAVPPPPDGGSCLFLGPEIKVSKADFRYWGQGTQVTVSS

SEQ ID NO: 48 - protein, 127 aa, Artificial Sequence
  Description of Artificial Sequence: Synthetic polypeptide
QVQLQESGGGSVQAGGSLRLSCTVSGYTYSSNCMGWFRQAPGKEREGVATIYTGGGNTYYADSVKGRFTISQDNAKNTVYLQMNNLKPEDTAMYYCAAEPLSRVYGGSCPTPTFDYWGQGTQVTVSS

SEQ ID NO: 49 - protein, 126 aa, Artificial Sequence
  Description of Artificial Sequence: Synthetic polypeptide
QVQLQESGGGSVQAGGSLRLSCGASGYTYSSYCMGWFRQVPGKEREGVAVIDSDGSTSYADSVKGRFTISKDNGKNTLYLQMNSLKPEDTAMYYCAADLGHYRPPCGVLYLGMDYWGKGTQVTVSS

SEQ ID NO: 50 - protein, 127 aa, Artificial Sequence
  Description of Artificial Sequence: Synthetic polypeptide
QVQLQESGGGSVQAGGSLRLSCAASGYSNCSYDMTWYRQAPGKEREFVSAIHSDGSTRYADSVKGRFFISQDNAKNTVYLQMNSLKPEDTAMYYCKTDPLHCRAHGGSWYSVRANYWGQGTQVTVSS

SEQ ID NO: 51 - protein, 126 aa, Artificial Sequence
  Description of Artificial Sequence: Synthetic polypeptide
QVQLQESGGGSVQAGGSLRLSCAASGYTYSSGCMGWFRQAPGKEREAVAAINSDGSTSYADSVKGRFTISKDNAKNTLYLQMNSLKPEDTAMYYCAAEPYCSGGYPRWSVAEFGYWGQGTQVTVSS

SEQ ID NO: 52 - protein, 124 aa, Artificial Sequence
  Description of Artificial Sequence: Synthetic polypeptide
QVQLQESGGGSVQAGGSLRLSCAASGYTYSSYCMGWFRQAPGKEREGVAHIDSDGSTSYADSVKGRFTISKDNAKNTLYLQMNSLKPEDTAMYYCAADPIPGPGYCDGGPNKYWGQGTQVTVSS

SEQ ID NO: 53 - protein, 121 aa, Artificial Sequence
  Description of Artificial Sequence: Synthetic polypeptide
QVQLQESGGGSVQAGGSLRLSCAASRYTYNSYCMGWFRQAPGKEREGVATIDSDGMTRYADSVKGRFTISKDNAKNTLYLQMNSLKPEDTAMYYCAADADCTIAAMTTNPLGQGTQVTVSS

SEQ ID NO: 54 - protein, 125 aa, Artificial Sequence
  Description of Artificial Sequence: Synthetic polypeptide
QVQLQESGGGSVQAGGSLRLSCTVSRYTASVNYMGWFRQAPGKEREGVATIFTGAGTTYYANSVKGRFTISRDNAKNTAYLQMNSLKPEDTAIYYCAVDFRGGLLYRPAYEYTYRGQGTQVTVSS

SEQ ID NO: 55 - protein, 126 aa, Artificial Sequence
  Description of Artificial Sequence: Synthetic polypeptide
QVQLQESGGGSVEAGGSLRLSCAASGYTHSSYCMGWFRQAPGKEREGVAAIDVDGSTTYADSVKGRFTISKDNAKNTLYLQMNSLKPEDTGMYYCAAEFADCSSNYFLPPGAVRYWGQGTQVTVSS

SEQ ID NO: 56 - protein, 124 aa, Artificial Sequence
  Description of Artificial Sequence: Synthetic polypeptide
QVQLQESGGGSVQAGGSLRLSCAASGYSYSSYCMGWFRQAPGKEREGVATIDSDGMTRYADSVKGRFTISKDNAKNTLYLQMNSLKPEDTAMYYCAAPLYDCDSGAVGRNPPYWGQGTQVTVSS

SEQ ID NO: 57 - protein, 122 aa, Artificial Sequence
  Description of Artificial Sequence: Synthetic polypeptide
QVQLQESGGGSVQTGGSLRLSCAASGYTYLRGCMGWFRQAPGKEREGVAVMDVVGDRRSYIDSVKGRFTISRDNAANSVYLQMDNLKPEDTAMYYCTAGPNCVGWRSGLDYWGQGTQVTVSS

SEQ ID NO: 58 - protein, 119 aa, Artificial Sequence
  Description of Artificial Sequence: Synthetic polypeptide
QVQLQESGGGSVQAGGSLRLSCAASGFTVTRYCMGWLRQAPGKQREGVAIIERDGRTGYADSVKGRFTISKDNAKNTLYLQMNSLKPEDTAMYYCGAIEGSCRPDFGYRGQGTQVTVSS

SEQ ID NO: 59 - protein, 121 aa, Artificial Sequence
  Description of Artificial Sequence: Synthetic polypeptide
QVQLQESGGGSVQAGGSLRLSCTASGLTFDDVEMAWYRQGPGDDYDLVSSINTDSRVYYVDSVKDRFTISRDNAKNTLYLQMNNLKPEDTAVYYCAADPWGGDLRGYPNYWGQGTQVTVSS

SEQ ID NO: 60 - protein, 124 aa, Artificial Sequence
  Description of Artificial Sequence: Synthetic polypeptide
QVQLQESGGGLVQAGGSLRLSCQASGYTYGLFCMGWFRQVSGKKREGVAVVDSPGGRHVADSLKGRFTISKDNANNILYLDMTNLKSEDTATYYCAADPEKYCFLFSDAGYQYWGQGTQVTVSS

SEQ ID NO: 61 - protein, 128 aa, Artificial Sequence
  Description of Artificial Sequence: Synthetic polypeptide
QVQLQESGGGSVQAGGSLRLSCAASGVTYSRYCMGWFRQAPGLERERVAHIYSRGIITYYTDSVKGRFTISQDSAKKTVYLQMNSLKPEDTAMYYCAATRETYGGSGDCGYESVYNYWAQGTQVTVSS

SEQ ID NO: 62 - protein, 121 aa, Artificial Sequence
  Description of Artificial Sequence: Synthetic polypeptide
QVQLQESGGGLVQPGGSLKLSCAASGFTFSTYAMSWVRQAPGKEPEWISRISSGGGNTYYADAVKGRFAISRDNAKNTLYLQLNSLKTEDTAIYVCTMDDYYGGSWHPISRGHGTQVTVSS

SEQ ID NO: 63 - protein, 117 aa, Artificial Sequence
  Description of Artificial Sequence: Synthetic polypeptide
QVQLQESGGGSVQAGGSLRLSCSASGFTVDDFAMGWYRQAPGNECELVSTISSGGSTYYADSVKGRFTISQDSAKNTVYLQMNSLKPEDTAVYYCAPSSVGCPLGYWGQGTQVTVSS

SEQ ID NO: 64 - protein, 119 aa, Artificial Sequence; identical to SEQ ID NO: 58
  Description of Artificial Sequence: Synthetic polypeptide

SEQ ID NO: 65 - protein, 121 aa, Artificial Sequence; identical to SEQ ID NO: 59
  Description of Artificial Sequence: Synthetic polypeptide

SEQ ID NO: 66 - protein, 124 aa, Artificial Sequence; identical to SEQ ID NO: 60
  Description of Artificial Sequence: Synthetic polypeptide

SEQ ID NO: 67 - protein, 128 aa, Artificial Sequence; identical to SEQ ID NO: 61
  Description of Artificial Sequence: Synthetic polypeptide

SEQ ID NO: 68 - protein, 121 aa, Artificial Sequence; identical to SEQ ID NO: 62
  Description of Artificial Sequence: Synthetic polypeptide

SEQ ID NO: 69 - protein, 117 aa, Artificial Sequence; identical to SEQ ID NO: 63
  Description of Artificial Sequence: Synthetic polypeptide

SEQ ID NO: 70 - protein, 124 aa, Artificial Sequence
  Description of Artificial Sequence: Synthetic polypeptide
QVQLQESGGGLVQPGESLRLSCTASGFTFSNYAMSWVRQAPGKGLEWVSGINVAYGITSYADSVKGRFTISRDNTKNTLYLQLNSLKTEDTAIYYCVKHSGTTIPRGFISYTKRGQGTQVTVSS

SEQ ID NO: 71 - protein, 123 aa, Artificial Sequence
  Description of Artificial Sequence: Synthetic polypeptide
QVQLQESGGGSVQVGGSLRLSCAASGFTFSSYPMSWVRQAPGKGLEWISTISAGGDTTLYADSVKGRFTSSRDNAKNTLYLQLNSLKTEDTAIYYCAKRIDCNSGYCYRRNYWGQGTQVTVSS

SEQ ID NO: 72 - protein, 129 aa, Artificial Sequence
  Description of Artificial Sequence: Synthetic polypeptide
QVQLQESGGGSVQAGGSLRLSCRASGSTYSNYCLGWFRQITGKEREGVAVINWVGGMLYFADSVKGRFTVSQDQAKNTLYLQMNSLKPEDTAMYYCAAESVSSFSCGGWLTRPDRVPYWGQGTQVTVSS

SEQ ID NO: 73 - protein, 120 aa, Artificial Sequence
  Description of Artificial Sequence: Synthetic polypeptide
QVQLQESGGGSVQAGGSLRLSCVASGYVSCDYFLPSWYRQAPGKEREFVSIIDGTGSTSYAASVKGRFTASQDKGKNIAYLQMNSLKPEDTAMYYCKASCVRGRGISEYWGQGTQVTVSS

SEQ ID NO: 74 - protein, 128 aa, Artificial Sequence
  Description of Artificial Sequence: Synthetic polypeptide
QVQLQESGGGSVQSGGSLRLSCAASGFTYSTSNSWMAWFRQAPGKEREGVAAIYTVGGSIFYADSVRGRFTISQDATKNMFYLQMNTLKPEDTAMYYCAAASGRLRGKWFWPYEYNYWGQGTQVTVSS

SEQ ID NO: 75 - protein, 123 aa, Artificial Sequence
  Description of Artificial Sequence: Synthetic polypeptide
QVQLQESGGGLVQPGGSLRLSCAASGFTFSHSGMSWVRQAPGKGLEWVSTINSGGASTYYTDSVKGRFTISRDNAKNMLYLQLNSLKTEDTAMYYCAKGGSGYGDASRMTSPGSQGTQVTVSS

SEQ ID NO: 76 - protein, 124 aa, Artificial Sequence
  Description of Artificial Sequence: Synthetic polypeptide
QVQLQESGGGSVQSGGSLRLSCAASGFTYSSYCMGWFRQAPGKEREGVAAIDSDGSTSYADSVKGRFTISKDNAKNTLYLQMNSLRPEDTAMYYCAADGEYNDYVCWSTGLRYRGQGTQVTVSS

SEQ ID NO: 77 - protein, 115 aa, Artificial Sequence
  Description of Artificial Sequence: Synthetic polypeptide
QVQLQESGGGLVQPGGSLRLSCVASGFTFSDYAMSWVRQAPGMGLERVSAIGRDGSTFYPDSVKGRFTISRDNAKNTLYLQLNSLKTEDTAMYYCAKEEPGSSSRGQGTQVTVSS

SEQ ID NO: 78 - protein, 129 aa, Artificial Sequence
  Description of Artificial Sequence: Synthetic polypeptide
QVQLQESGGGSVQAGGSLRLSCAVSRYTISRSDCMGWFRQAPGKEREGVARIGSDGTTSYADSVKERFTISKDNAKNILYLQMNSLKPEDTARYYCAATALLLGRGSACHKEVSVFSWWGQGTQVTVSS

SEQ ID NO: 79 - protein, 116 aa, Artificial Sequence
  Description of Artificial Sequence: Synthetic polypeptide
QVQLQESGGGLVQPGGSLRLSCAASGFTFSNYGMSWVRQAPGKGLEWVSGINSGGDDTFYTDSVKGRFTISRDNAKNTLYLQMNSLKTEDTAMYYCAMGASGMIPRGQGTQITVSS

SEQ ID NO: 80 - protein, 127 aa, Artificial Sequence
  Description of Artificial Sequence: Synthetic polypeptide
QVQLQESGGGSVQLGGSLRLSCLVSGSTDNIKYMGWFRQAPGKEREGVAAVYTSGGAVVYADSVKGRFTISQDDAKNTMYLQMNSLKPEDTAMYYCAASRAPAPPRLLLQRALVEYWGQGTQVTVSS

SEQ ID NO: 81 - protein, 121 aa, Artificial Sequence
  Description of Artificial Sequence: Synthetic polypeptide
QVQLQESGGGLVQPGGSLRLSCAASGFTFSNATMSWVRQAPGKEIEWVSAISNSRGTKYYAAFVKGRFTISRDNAKNTLYLQLNNLKTEDTAMYYCTKDWKTSYSDYDLSDGQGTQVTVSS

SEQ ID NO: 82 - protein, 127 aa, Artificial Sequence
  Description of Artificial Sequence: Synthetic polypeptide
QVQLQESGGGSVQAGGSLRLSCASSGYISSSYCMAWFRQAPGKEREGAAGVTRDGKTYYGDSVKGRFAISRDNAKNTLYLQMNSLKPEDTAMYYCAAGPPPCITSMPAGGDYGYRYWGQGTQVTVSS

SEQ ID NO: 83 - protein, 114 aa, Artificial Sequence
  Description of Artificial Sequence: Synthetic polypeptide
QVQLQESGGALVQPGGSLRLSCAASGFTFSYYAMKWVRQAPGKGLEWVSSISGGGGATYYADSVKGRFTISRDNTNDTLYLQMNSLKTEDTAVYYCAAQNLDYRGQGTQVTVSS

SEQ ID NO: 84 - protein, 112 aa, Artificial Sequence
  Description of Artificial Sequence: Synthetic polypeptide
QVQLQESGGGLVQPGGSLRLSCTASGFTFNSAHLKWERQPPGKGLEWVSFITNGGASTGYADSVKGRFTISRDDAKNTLYLQMNNLKTEDTAVYYCATGGLRGQGTQVTVSS

SEQ ID NO: 85 - protein, 124 aa, Artificial Sequence
  Description of Artificial Sequence: Synthetic polypeptide
QVQLQESGGGLVQPGGSLRLSCAASGFTLSTYWMYWVRQAPGKGPEWVSAVSRGGFNTYYADSVKGRFTISRDNAKNTVYLQMNSLKPEDTAVYYCMSSVSFYGWPPDRVPSPTGQGTQVTVSS

SEQ ID NO: 86 - protein, 124 aa, Artificial Sequence
  Description of Artificial Sequence: Synthetic polypeptide
QVQLQESGGGSVQPGGSLRLSCAASGFTFSTYDMSWVRQAPGKGLEWVSTINYSGSSTYYVDSVLGRFTIARDNAKNTLYLQMNNLQTEDTAVYYCASVKERRSNGHPIVFGDRGQGTQVTVSS

SEQ ID NO: 87 - protein, 125 aa, Artificial Sequence
  Description of Artificial Sequence: Synthetic polypeptide
QVQLQESGGGLVQPGGSLRLSCAASGFTFRNYAMSWVRQAPGKGLEWVSAINSGGGSTYYADSVKGRFTISRDNAKNTLYLQMNSLKPEDTAMYYCAKHVTGDYDPSLRYEYNYWSQGTQVTVSS

SEQ ID NO: 88 - protein, 125 aa, Artificial Sequence
  Description of Artificial Sequence: Synthetic polypeptide
QVQLQESGGGSVQAGGSLRLSCVISGFTYRQTFMGWFRQVVGKEREGVAAISTGGGSTIYADSVKGRFTISQDSSKDTVYLEMNGLKLEDTGMYYCAASTVITSESINRNLYQYWGQGTQVTVSS

SEQ ID NO: 89 - protein, 122 aa, Artificial Sequence
  Description of Artificial Sequence: Synthetic polypeptide
QVQLQESGGGSVQAGGFLRLSCAFSGYTGCMGWFRQGPGQEREGVASINDGGSLTYADSVKGRFTISKDNAKKTLDLQMNTLKPEDTAMYYCAASLSYCLNPTLRVDGYNYWGQGTQVTVSS

SEQ ID NO: 90 - protein, 121 aa, Artificial Sequence
  Description of Artificial Sequence: Synthetic polypeptide
QVQLQESGGGLVQPGGSLRLSCAASGFTFSLYDMSWVRQAPGKGLEWVSGINSGGYSTYYAASAKGRFTISRDNAKNTLYLQLSSVKTEDTAMYYCAQRGLTSPYVIPNIRLQGTQVTVSS

SEQ ID NO: 91 - protein, 112 aa, Artificial Sequence
  Description of Artificial Sequence: Synthetic polypeptide
QVQLQESGGGLVQPGGSLRLSCAASEFTFSNNWMHWVRQAPGKGFEWVSSIHSGMAITHYRGSVKGRFTISSDIAKNIVSLQMNSLKAEDTAVYYCVGEGNWGQGTQVTVSS

SEQ ID NO: 92 - protein, 127 aa, Artificial Sequence
  Description of Artificial Sequence: Synthetic polypeptide
QVQLQESGGGSVLAGGSLRLSCVASGYGYNYIGWFRQTPGKEREGVAVIYTGGGDTYYADSVKGRFTASRDNAKSTLYLQMNSLEPEDTAMYYGVARYCVGSVYACLRGGHDEYAHWGQGTQVTVSS

SEQ ID NO: 93 - protein, 134 aa, Artificial Sequence
  Description of Artificial Sequence: Synthetic polypeptide
QVQLQESGGGSVQPGGSLRLSCAASGSTYANYLMGWFRQAPGKEREGVAAIYSGGGSTYYADSVKGRFTISQDNAKNTLYLQMNSLKPEDTAMYYCAAASAVKGDKGDIVVVVTGTQRMEYDYWGHGTQVTVSS

SEQ ID NO: 94 - protein, 132 aa, Artificial Sequence
  Description of Artificial Sequence: Synthetic polypeptide
QVQLQESGGGSVQAGASLRLSCSVSGFTFDESVMSWLRQGPGNECDAVAIISSDDNTYYDDSVKGRFTISEDNAKNMVYLQMNSLKPEDTAVYYCAARRRRPVYDSDYELRPRPLCGDFGVWGQGTQVTVSS

SEQ ID NO: 95 - protein, 129 aa, Artificial Sequence
  Description of Artificial Sequence: Synthetic polypeptide
QVQLQESGGGSVQAGGSLRLSCIGSGLPFDEDDMGWYRQAPGNECELVSSISSDGTAYYADSVKGRFTISRDNAKNTVLLQMNSLKPEDTAVYYCAAGVHRQFGGSSSCGDAFYGMDYWGKGTQVTVSS

SEQ ID NO: 96 - protein, 124 aa, Artificial Sequence
  Description of Artificial Sequence: Synthetic polypeptide
QVQLQESGGGSVQAGGSLRLSCVASGDVYGRNSMAWFRQAPGKEREGVAVGYSVVTTTYYADSVKGRFTISEDNDKNTVYLEMNSLKPEDTAMYYCAADGNLWRGLRPSEYTYWGQGTQVTVSS

SEQ ID NO: 97 - protein, 126 aa, Artificial Sequence
  Description of Artificial Sequence: Synthetic polypeptide
QVQLQESGGGSVQAGGSLRLSCTASGFTFDDFDMGWYRQAPGNECELVSTISDDGSTYYADSVKGRSSISRDNAKNTVYLQMNRLKPEDTGVYYCAAEGALGSKMNCGWVGNFGYWGQGTQVTVSS

SEQ ID NO: 98 - protein, 128 aa, Artificial Sequence
  Description of Artificial Sequence: Synthetic polypeptide
QVQLQESGGGSVQAGGSLRLSCATSGFPYSRYCMGWFRQAPGKEREGVAAIEPDGSTSYADSVKGRFTISQDNAVNTLYLQMNNLKPEDTAMYYCAADERCFYLKDYDLRRPAQYRYWGQGTQVTVSS

SEQ ID NO: 99 - protein, 125 aa, Artificial Sequence
  Description of Artificial Sequence: Synthetic polypeptide
QVQLQESGGGSVQAGGSLRLSCAASGYTYNRRFMGWFRQAPGKEREGLAIIYTPNSSTFYADSVTGRFTISQDSARNTVYLQMNSLKPEDTAMYYCAAARIASMTELSVRDMDYWGKGTQVTVSS

SEQ ID NO: 100 - protein, 126 aa, Artificial Sequence
  Description of Artificial Sequence: Synthetic polypeptide
QVQLQESGGGSVQAGGSLRLSCTASRYIALNACMAWIRQAPGSEREVVATIVTDGSRTYYADSVKGRFTISQDNAKNTMYLQMNGLKPEDTAMYYCAADRRCPVSRAPYEYELRYWGQGTQVTVSS

SEQ ID NO: 101 - protein, 123 aa, Artificial Sequence
  Description of Artificial Sequence: Synthetic polypeptide
QVQLQESGGGSVQAGGSLRLSCVASGDTYSRKYIAWVRQVPGKEREGVAVMYTPGSATYYTDTVMGRFTISQDNAKNTVYLQMNSLKPEDTAMYFCAAKASGSMFNFRDYTYWGQGTQVTVSS

SEQ ID NO: 102 - protein, 127 aa, Artificial Sequence
  Description of Artificial Sequence: Synthetic polypeptide
QVQLQESGGGSVQAGGALRLSCTASGYTASSICMGWFRQAPGKERERVAVITTAASGTYYADSVNGRFSISQNNAKNTVYLQMNSLKPDDTAMYYCAATRRGGDCLDPLQTPAYNTWGQGTQVTVSS

SEQ ID NO: 103 - protein, 121 aa, Artificial Sequence
  Description of Artificial Sequence: Synthetic polypeptide
QVQLQESGGGSVQAGGSLRLSCATSGYASCSRAMRWYRQAPGKEREFVAYIDGVGSTGYADSVKGRFTISQDNAKYTAYLQMNSLKPEDTAMYYCNRGCRADGSNSLDNYWGQGTQVTVSS

SEQ ID NO: 104 - protein, 123 aa, Artificial Sequence
  Description of Artificial Sequence: Synthetic polypeptide
QVQLQESGGGSVQAGGSLRLSCAASGYTYNGKCMAWFRQAPGKEREVVAGIYTGGSSTYYADSVKGRFTISQDNAKNTVYLQMDSLKPEDTAMYYCATSRSCSDLRRRSIAYWGQGTQVTVSS

SEQ ID NO: 105 - protein, 127 aa, Artificial Sequence
  Description of Artificial Sequence: Synthetic polypeptide
QVQLQESGGGSVQAGGSLRLSCTASGYTYSSAFMAWFRQAPGKEREGVAAIYTRDGGTVYADSVKGRFTISQDNAKNTLYLQMNSLKAEDTAMYYCAAKIPQPGRASLLDSQTYDYWGQGTQVTVSS

SEQ ID NO: 106 - protein, 126 aa, Artificial Sequence
  Description of Artificial Sequence: Synthetic polypeptide
QVQLQESGGGSVQAGGSLRLSCAVSGYDYCGYDVRWYRQAPGKEREFVSGIDSDGSTSYADSVKGRFTISQDNAENTSYLHMFSLKPEDTAMYYCKTESPAGESAWCRNFRGMDYWGKGTQVTVSS

SEQ ID NO: 107 - protein, 126 aa, Artificial Sequence
  Description of Artificial Sequence: Synthetic polypeptide
QVQLQESGGGSVQAGGSLRLSCVASGYSYCGYDMMWYRQAPGKEREFVALITSDYSIRYEDSVEGRFSISRDNAKNTGYLLMSNLTPADTAIYYCKTSTAARESSWCRSRYRVASWGQGTQVTVSS

SEQ ID NO: 108 - protein, 127 aa, Artificial Sequence
  Description of Artificial Sequence: Synthetic polypeptide
QVQLQESGGGSVQAGGSLRLSCAASRYTYTNNFMAWFRQAPGKEREGVAAIYTGDGYAYYFDSVKGRFTISQDNDKNMLYLQMNSLKPEDTAMYYCAAMERRSGRRRMTENAEYKYWGQGTQVTVSS

SEQ ID NO: 109 - protein, 121 aa, Artificial Sequence
  Description of Artificial Sequence: Synthetic polypeptide
QVQLQESGGGSVQAGETLRLSCTVSGFTIDDSEMGWYRQAPGHECELVASGSSDDDTYYVDSVKGRFTISLDNAKNMVYLQMNSLKPEDTAVYYCATGPTYPPKDGDCAHWGQGTQVTVSS

SEQ ID NO: 110 - protein, 127 aa, Artificial Sequence
  Description of Artificial Sequence: Synthetic polypeptide
QVQLQESGGGSVQAGGSLRLSCTASGYTYSSAFMAWFRQAPGKEREGVAAIYTRDGSPVYADSLKGRFTISQDNAKNTLHLQMNSLKPEDTAMYYCAAKIPEPGRISLLDSQTYDYWGHGTQVTVSS

SEQ ID NO: 111 - protein, 126 aa, Artificial Sequence
  Description of Artificial Sequence: Synthetic polypeptide
QVQLQESGGGSVQAGGSLRLSCAVSGYDYCGYDVRWYRRAPGKEREFVSGIDSDGSTSYADSVKGRFTISQDNAENTSYLHMFSLKPEDTAMYYCKTESPAGESAWCRNFRGMDYWGKGTQVTVSS

SEQ ID NO: 112 - protein, 126 aa, Artificial Sequence
  Description of Artificial Sequence: Synthetic polypeptide
QVQLQESGGGSVQAGGSLRLSCAASGYTYSNRHMGWFRQAPGKEREGVAAIYTGGGSTYYADSVKDRFTISQDNAKNTLYLQMNSLTPEDTAMYYCAADLTRWYSGGWRDPRGYKYWGQGTQVTVS

SEQ ID NO: 113 - protein, 128 aa, Artificial Sequence
  Description of Artificial Sequence: Synthetic polypeptide
QVQLQESGGGSVQAGGSLRLSCAASGVTYGSYYMAAWFRQAPGKEREGVASIYGGSDSTYYADSVLGRFTISQDNGKNTLYLQMNSLKPDDTAMYYCAAAPPGKWFLKRLEGHNYSYWGQGTQVTVSS

SEQ ID NO: 114 - protein, 131 aa, Artificial Sequence
  Description of Artificial Sequence: Synthetic polypeptide
QVQLQESGGGSVQVGGSLRLSCAASGFTYSSSCLGWFRQAPGKEREGVATIYPAGGNIFYADSVKGRFTISQDNAKNTVYLQMDSLKPEDTAMYYCAARGGQTWGSGGNRCSLWLPAYNYWGQGTQVTVSS

SEQ ID NO: 115 - protein, 123 aa, Artificial Sequence
  Description of Artificial Sequence: Synthetic polypeptide
QVQLQESGGGSVQVGGSLRLSCAVSGKLYGGAWFRQAQGKGREGVAAIWIGTGTTFYADSVKGRFTISRDNAKNTVYLQMDGLKPEDTALYYCAADDRPGYRDPLAPVSYNHWGQGTQVTVSS

SEQ ID NO: 116 - protein, 126 aa, Artificial Sequence
  Description of Artificial Sequence: Synthetic polypeptide
QVQLQESGGGSVQAGGSLRLSCAASGITYRGVWMGWFRQAPGKEREGVATIYTGSGHTYYADSVKGRFTISQDNAKNTVYLQMNSLKPEDTAMYYCAARTVGGTFYTLAADSFNTWGQGTQVTVSS

SEQ ID NO: 117 - protein, 126 aa, Artificial Sequence
  Description of Artificial Sequence: Synthetic polypeptide
QVQLQESGGGSVQDGGSLRLSCAASGDIYARNCMGWFRQAPGKEREKIAVADTGGRSPYYADSVKGRFTISRDNAKNTVDLQMNSLKPEDTAVYYCAAGPLVPVVNTAARCVYEYWGQGTQVTVSS

SEQ ID NO: 118 - protein, 116 aa, Artificial Sequence
  Description of Artificial Sequence: Synthetic polypeptide
QVQLQESGGGSVQAGGSLRLSCAASGYTYSSCTMGWYRQAPGKERELVSMLISDGSTFYADSVKGRFTFSQEYAKNTVYLQMNSLKPEDTAMYYCGCATLGSRTVWGQGTQVTVSS

SEQ ID NO: 119 - protein, 116 aa, Artificial Sequence
  Description of Artificial Sequence: Synthetic polypeptide
QVQLQESGGGSVQAGGSLTLSCTAPGFTFRLAAMRWVRQAPGKGLEWVSGIDSRGSTIYADSVKGRFTISKDNAKNTLYLQLNSLKTEDTAMYYCAQGVYGDTYSGSQGTQVTVSS

SEQ ID NO: 120 - protein, 127 aa, Artificial Sequence
  Description of Artificial Sequence: Synthetic polypeptide
QVQLQESGGGSVQAGGSLRLSCTASVNTYCEYNMSWYRQAPGKEREFVSGVDSDGSTRYSESVKGRFTISQDNAKNTMYLQMNGLKPEDTAMYYCKTYVCTFCSGNSCYYEYKYYYEGQGTQVTVSS

SEQ ID NO: 121 - protein, 121 aa, Artificial Sequence
  Description of Artificial Sequence: Synthetic polypeptide
QVQLQESGGGSVQAGGSLRLSCAASGYTYSNNCMGWFRQAPGKDRERIANIYTGGGRTTYADSVKGRFTISQDSAKSTVYLQMNSLKPEDTAMYYCAAGSCGSARSEYSYWGQGTQVTVSS

SEQ ID NO: 122 - protein, 120 aa, Artificial Sequence
  Description of Artificial Sequence: Synthetic polypeptide
QVQLQESGGGSVQAGGSLRLSCAASGYTFCMAWFRQAPGKEREGVARFYTRDGYTYYSDSVKGRFTISQNNAKNTLYLQMNSLKSEDTAMYYCAADLARCSSNKNDFRYWGQGTQVTVSS

SEQ ID NO: 123 - protein, 127 aa, Artificial Sequence
  Description of Artificial Sequence: Synthetic polypeptide
QVQLQESGGGSVQAGGSLRLSCAASGYTSGNYWMGWFRQAPGKEREGVATLWTGGASTFYGDSVKGRFTISRDNFKNTLYLQMNSLKVEDTAMYYCAADPALRLGANILRPAEYKYWGQGTQVTVSS

SEQ ID NO: 124 - protein, 118 aa, Artificial Sequence
  Description of Artificial Sequence: Synthetic polypeptide
QVQLQESGGGLVQPGGSLRLSCAASGFTFSRSAMTWVRQAPGKGLDWVSGIDSGGTTVYADSVKGRFTISRDSAKNTLYLQMNSLKTEDTAVYYCAIGLPWGNTWRTRGQGTQVTVSS

SEQ ID NO: 125 - protein, 120 aa, Artificial Sequence
  Description of Artificial Sequence: Synthetic polypeptide
QVQLQESGGGSVQAGGSLRLSCAVSGDSTYSMGWFRQPPGKEREGVAAITKDITIHADSVKGRFTISKDNAKNTLYLQMNSLKPEDTAMYYCAAHRPYGPPLNPRWYTYWGQGTQVTVSS

SEQ ID NO: 126 - protein, 121 aa, Artificial Sequence
  Description of Artificial Sequence: Synthetic polypeptide
QVQLQESGGGSVQAGGSLRLSCTASGYTSSRYCMGWFRQTPGKKREGVAAIYTGGGTTFYHGSVKGRFTISQDNTTNTVYLQMHNLKPEDTAMYYCAAGPVTRACDEYNYWGQGTQVTVSS

SEQ ID NO: 127 - protein, 123 aa, Artificial Sequence
  Description of Artificial Sequence: Synthetic polypeptide
QVQLQESGGGSVQAGGSLRLSCAASGYSINRMGWFRQAPGKEREGVAAISIGGGQTYYADSVKGRFTISQDNAKNTVDLQMNSLKPEDTAMYYCAAGLVYGEAWLDSRHYNKWGQGTQVTVSS

SEQ ID NO: 128 - protein, 126 aa, Artificial Sequence
  Description of Artificial Sequence: Synthetic polypeptide
QVQLQESGGGSVQAGGSLRLSCAGSGYSLSNYCMGWFRQAPGQGREGVASLRFVSGATFYADSVKGRFTIAQDNAKNTLYLQMNSLKPEDTAMYYCGIKSRGICGGRLVDVDFGNWGQGTQVTVSS

SEQ ID NO: 129 - protein, 123 aa, Artificial Sequence
  Description of Artificial Sequence: Synthetic polypeptide
QVQLQESGGGSVQAGGSLRLSCAASKNSNFMGWFRQAPGKEREGVAAMMTKNNNTYYADSVKGRFTISHDNAKNTVYLQMDSLKPEDTAVYYCAAVYRTRRLRVLEAANFDYWGQGTQVTVSS

SEQ ID NO: 130 - protein, 122 aa, Artificial Sequence
  Description of Artificial Sequence: Synthetic polypeptide
QVQLQESGGGSVQAGGSLRLSCAASGYTYSSYCMAWFRQAPGKEREGVAAIDSDGSTSYADSVKGRFTISKDNAKNTLYLQMNSLKPEDTAMYYCAAASGRCLGPGIRSLIWGQGTQVTVSS

SEQ ID NO: 131 - protein, 257 aa, Artificial Sequence
  Description of Artificial Sequence: Synthetic polypeptide
QVQLQESGGGSVQAGGSLRLSCTASGYTYSSAFMAWFRQAPGKEREGVAAIYTRDGGTVYADSVKGRFTISQDNAKNTLYLQMNSLKAEDTAMYYCAAKIPQPGRASLLDSQTYDYWGQGTQVTVSSGGGSQVQLQESGGGSVQAGGSLRLSCAASGYTYSNRHMGWFRQAPGKEREGVAAIYTGGGSTYYADSVKDRFTISQDNAKNTLYLQMNSLTPEDTAMYYCAADLTRWYSGGWRDPRGYKYWGQGTQVTVS

SEQ ID NO: 132 - protein, 259 aa, Artificial Sequence
  Description of Artificial Sequence: Synthetic polypeptide
QVQLQESGGGSVQAGGSLRLSCTASGYTYSSAFMAWFRQAPGKEREGVAAIYTRDGGTVYADSVKGRFTISQDNAKNTLYLQMNSLKAEDTAMYYCAAKIPQPGRASLLDSQTYDYWGQGTQVTVSSGGGSQVQLQESGGGSVQAGGSLRLSCAASGVTYGSYYMAAWFRQAPGKEREGVASIYGGSDSTYYADSVLGRFTISQDNGKNTLYLQMNSLKPDDTAMYYCAAAPPGKWFLKRLEGHNYSYWGQGTQVTVSS

SEQ ID NO: 133 - protein, 262 aa, Artificial Sequence
  Description of Artificial Sequence: Synthetic polypeptide
QVQLQESGGGSVQAGGSLRLSCTASGYTYSSAFMAWFRQAPGKEREGVAAIYTRDGGTVYADSVKGRFTISQDNAKNTLYLQMNSLKAEDTAMYYCAAKIPQPGRASLLDSQTYDYWGQGTQVTVSSGGGSQVQLQESGGGSVQVGGSLRLSCAASGFTYSSSCLGWFRQAPGKEREGVATIYPAGGNIFYADSVKGRFTISQDNAKNTVYLQMDSLKPEDTAMYYCAARGGQTWGSGGNRCSLWLPAYNYWGQGTQVTVSS

SEQ ID NO: 134 - protein, 254 aa, Artificial Sequence
  Description of Artificial Sequence: Synthetic polypeptide
QVQLQESGGGSVQAGGSLRLSCTASGYTYSSAFMAWFRQAPGKEREGVAAIYTRDGGTVYADSVKGRFTISQDNAKNTLYLQMNSLKAEDTAMYYCAAKIPQPGRASLLDSQTYDYWGQGTQVTVSSGGGSQVQLQESGGGSVQVGGSLRLSCAVSGKLYGGAWFRQAQGKGREGVAAIWIGTGTTFYADSVKGRFTISRDNAKNTVYLQMDGLKPEDTALYYCAADDRPGYRDPLAPVSYNHWGQGTQVTVSS

SEQ ID NO: 135 - protein, 257 aa, Artificial Sequence
  Description of Artificial Sequence: Synthetic polypeptide
QVQLQESGGGSVQAGGSLRLSCTASGYTYSSAFMAWFRQAPGKEREGVAAIYTRDGGTVYADSVKGRFTISQDNAKNTLYLQMNSLKAEDTAMYYCAAKIPQPGRASLLDSQTYDYWGQGTQVTVSSGGGSQVQLQESGGGSVQAGGSLRLSCAASGITYRGVWMGWFRQAPGKEREGVATIYTGSGHTYYADSVKGRFTISQDNAKNTVYLQMNSLKPEDTAMYYCAARTVGGTFYTLAADSFNTWGQGTQVTVSS

SEQ ID NO: 136 - protein, 257 aa, Artificial Sequence
  Description of Artificial Sequence: Synthetic polypeptide
QVQLQESGGGSVQAGGSLRLSCTASGYTYSSAFMAWFRQAPGKEREGVAAIYTRDGGTVYADSVKGRFTISQDNAKNTLYLQMNSLKAEDTAMYYCAAKIPQPGRASLLDSQTYDYWGQGTQVTVSSGGGSQVQLQESGGGSVQDGGSLRLSCAASGDIYARNCMGWFRQAPGKEREKIAVADTGGRSPYYADSVKGRFTISRDNAKNTVDLQMNSLKPEDTAVYYCAAGPLVPVVNTAARCVYEYWGQGTQVTVSS

SEQ ID NO: 137 - protein, 256 aa, Artificial Sequence
  Description of Artificial Sequence: Synthetic polypeptide
QVQLQESGGGSVQAGGSLRLSCAVSGYDYCGYDVRWYRQAPGKEREFVSGIDSDGSTSYADSVKGRFTISQDNAENTSYLHMFSLKPEDTAMYYCKTESPAGESAWCRNFRGMDYWGKGTQVTVSSGGGSQVQLQESGGGSVQAGGSLRLSCAASGYTYSNRHMGWFRQAPGKEREGVAAIYTGGGSTYYADSVKDRFTISQDNAKNTLYLQMNSLTPEDTAMYYCAADLTRWYSGGWRDPRGYKYWGQGTQVTVS

SEQ ID NO: 138 - protein, 258 aa, Artificial Sequence
  Description of Artificial Sequence: Synthetic polypeptide
QVQLQESGGGSVQAGGSLRLSCAVSGYDYCGYDVRWYRQAPGKEREFVSGIDSDGSTSYADSVKGRFTISQDNAENTSYLHMFSLKPEDTAMYYCKTESPAGESAWCRNFRGMDYWGKGTQVTVSSGGGSQVQLQESGGGSVQAGGSLRLSCAASGVTYGSYYMAAWFRQAPGKEREGVASIYGGSDSTYYADSVLGRFTISQDNGKNTLYLQMNSLKPDDTAMYYCAAAPPGKWFLKRLEGHNYSYWGQGTQVTVSS

SEQ ID NO: 139 - protein, 261 aa, Artificial Sequence
  Description of Artificial Sequence: Synthetic polypeptide
QVQLQESGGGSVQAGGSLRLSCAVSGYDYCGYDVRWYRQAPGKEREFVSGIDSDGSTSYADSVKGRFTISQDNAENTSYLHMFSLKPEDTAMYYCKTESPAGESAWCRNFRGMDYWGKGTQVTVSSGGGSQVQLQESGGGSVQVGGSLRLSCAASGFTYSSSCLGWFRQAPGKEREGVATIYPAGGNIFYADSVKGRFTISQDNAKNTVYLQMDSLKPEDTAMYYCAARGGQTWGSGGNRCSLWLPAYNYWGQGTQVTVSS

SEQ ID NO: 140 - protein, 253 aa, Artificial Sequence
  Description of Artificial Sequence: Synthetic polypeptide
QVQLQESGGGSVQAGGSLRLSCAVSGYDYCGYDVRWYRQAPGKEREFVSGIDSDGSTSYADSVKGRFTISQDNAENTSYLHMFSLKPEDTAMYYCKTESPAGESAWCRNFRGMDYWGKGTQVTVSSGGGSQVQLQESGGGSVQVGGSLRLSCAVSGKLYGGAWFRQAQGKGREGVAAIWIGTGTTFYADSVKGRFTISRDNAKNTVYLQMDGLKPEDTALYYCAADDRPGYRDPLAPVSYNHWGQGTQVTVSS

SEQ ID NO: 141 - protein, 256 aa, Artificial Sequence
  Description of Artificial Sequence: Synthetic polypeptide
QVQLQESGGGSVQAGGSLRLSCAVSGYDYCGYDVRWYRQAPGKEREFVSGIDSDGSTSYADSVKGRFTISQDNAENTSYLHMFSLKPEDTAMYYCKTESPAGESAWCRNFRGMDYWGKGTQVTVSSGGGSQVQLQESGGGSVQAGGSLRLSCAASGITYRGVWMGWFRQAPGKEREGVATIYTGSGHTYYADSVKGRFTISQDNAKNTVYLQMNSLKPEDTAMYYCAARTVGGTFYTLAADSFNTWGQGTQVTVSS

SEQ ID NO: 142 - protein, 256 aa, Artificial Sequence
  Description of Artificial Sequence: Synthetic polypeptide
QVQLQESGGGSVQAGGSLRLSCAVSGYDYCGYDVRWYRQAPGKEREFVSGIDSDGSTSYADSVKGRFTISQDNAENTSYLHMFSLKPEDTAMYYCKTESPAGESAWCRNFRGMDYWGKGTQVTVSSGGGSQVQLQESGGGSVQDGGSLRLSCAASGDIYARNCMGWFRQAPGKEREKIAVADTGGRSPYYADSVKGRFTISRDNAKNTVDLQMNSLKPEDTAVYYCAAGPLVPVVNTAARCVYEYWGQGTQVTVSS

SEQ ID NO: 143 - protein, 256 aa, Artificial Sequence
  Description of Artificial Sequence: Synthetic polypeptide
QVQLQESGGGSVQAGGSLRLSCVASGYSYCGYDMMWYRQAPGKEREFVALITSDYSIRYEDSVEGRFSISRDNAKNTGYLLMSNLTPADTAIYYCKTSTAARESSWCRSRYRVASWGQGTQVTVSSGGGSQVQLQESGGGSVQAGGSLRLSCAASGYTYSNRHMGWFRQAPGKEREGVAAIYTGGGSTYYADSVKDRFTISQDNAKNTLYLQMNSLTPEDTAMYYCAADLTRWYSGGWRDPRGYKYWGQGTQVTVS

SEQ ID NO: 144 - protein, 258 aa, Artificial Sequence
  Description of Artificial Sequence: Synthetic polypeptide
QVQLQESGGGSVQAGGSLRLSCVASGYSYCGYDMMWYRQAPGKEREFVALITSDYSIRYEDSVEGRFSISRDNAKNTGYLLMSNLTPADTAIYYCKTSTAARESSWCRSRYRVASWGQGTQVTVSSGGGSQVQLQESGGGSVQAGGSLRLSCAASGVTYGSYYMAAWFRQAPGKEREGVASIYGGSDSTYYADSVLGRFTISQDNGKNTLYLQMNSLKPDDTAMYYCAAAPPGKWFLKRLEGHNYSYWGQGTQVTVSS

SEQ ID NO: 145 - protein, 261 aa, Artificial Sequence
  Description of Artificial Sequence: Synthetic polypeptide
QVQLQESGGGSVQAGGSLRLSCVASGYSYCGYDMMWYRQAPGKEREFVALITSDYSIRYEDSVEGRFSISRDNAKNTGYLLMSNLTPADTAIYYCKTSTAARESSWCRSRYRVASWGQGTQVTVSSGGGSQVQLQESGGGSVQVGGSLRLSCAASGFTYSSSCLGWFRQAPGKEREGVATIYPAGGNIFYADSVKGRFTISQDNAKNTVYLQMDSLKPEDTAMYYCAARGGQTWGSGGNRCSLWLPAYNYWGQGTQVTVSS

SEQ ID NO: 146 - protein, 253 aa, Artificial Sequence
  Description of Artificial Sequence: Synthetic polypeptide
QVQLQESGGGSVQAGGSLRLSCVASGYSYCGYDMMWYRQAPGKEREFVALITSDYSIRYEDSVEGRFSISRDNAKNTGYLLMSNLTPADTAIYYCKTSTAARESSWCRSRYRVASWGQGTQVTVSSGGGSQVQLQESGGGSVQVGGSLRLSCAVSGKLYGGAWFRQAQGKGREGVAAIWIGTGTTFYADSVKGRFTISRDNAKNTVYLQMDGLKPEDTALYYCAADDRPGYRDPLAPVSYNHWGQGTQVTVSS

SEQ ID NO: 147 - protein, 256 aa, Artificial Sequence
  Description of Artificial Sequence: Synthetic polypeptide
QVQLQESGGGSVQAGGSLRLSCVASGYSYCGYDMMWYRQAPGKEREFVALITSDYSIRYEDSVEGRFSISRDNAKNTGYLLMSNLTPADTAIYYCKTSTAARESSWCRSRYRVASWGQGTQVTVSSGGGSQVQLQESGGGSVQAGGSLRLSCAASGITYRGVWMGWFRQAPGKEREGVATIYTGSGHTYYADSVKGRFTISQDNAKNTVYLQMNSLKPEDTAMYYCAARTVGGTFYTLAADSFNTWGQGTQVTVSS

SEQ ID NO: 148 - protein, 256 aa, Artificial Sequence
  Description of Artificial Sequence: Synthetic polypeptide
QVQLQESGGGSVQAGGSLRLSCVASGYSYCGYDMMWYRQAPGKEREFVALITSDYSIRYEDSVEGRFSISRDNAKNTGYLLMSNLTPADTAIYYCKTSTAARESSWCRSRYRVASWGQGTQVTVSSGGGSQVQLQESGGGSVQDGGSLRLSCAASGDIYARNCMGWFRQAPGKEREKIAVADTGGRSPYYADSVKGRFTISRDNAKNTVDLQMNSLKPEDTAVYYCAAGPLVPVVNTAARCVYEYWGQGTQVTVSS

SEQ ID NO: 149 - protein, 257 aa, Artificial Sequence
  Description of Artificial Sequence: Synthetic polypeptide
QVQLQESGGGSVQAGGSLRLSCAASRYTYTNNFMAWFRQAPGKEREGVAAIYTGDGYAYYFDSVKGRFTISQDNDKNMLYLQMNSLKPEDTAMYYCAAMERRSGRRRMTENAEYKYWGQGTQVTVSSGGGSQVQLQESGGGSVQAGGSLRLSCAASGYTYSNRHMGWFRQAPGKEREGVAAIYTGGGSTYYADSVKDRFTISQDNAKNTLYLQMNSLTPEDTAMYYCAADLTRWYSGGWRDPRGYKYWGQGTQVTVS

SEQ ID NO: 150 - protein, 259 aa, Artificial Sequence
  Description of Artificial Sequence: Synthetic polypeptide
QVQLQESGGGSVQAGGSLRLSCAASRYTYTNNFMAWFRQAPGKEREGVAAIYTGDGYAYYFDSVKGRFTISQDNDKNMLYLQMNSLKPEDTAMYYCAAMERRSGRRRMTENAEYKYWGQGTQVTVSSGGGSQVQLQESGGGSVQAGGSLRLSCAASGVTYGSYYMAAWFRQAPGKEREGVASIYGGSDSTYYADSVLGRFTISQDNGKNTLYLQMNSLKPDDTAMYYCAAAPPGKWFLKRLEGHNYSYWGQGTQVTVSS

SEQ ID NO: 151 - protein, 262 aa, Artificial Sequence
  Description of Artificial Sequence: Synthetic polypeptide
QVQLQESGGGSVQAGGSLRLSCAASRYTYTNNFMAWFRQAPGKEREGVAAIYTGDGYAYYFDSVKGRFTISQDNDKNMLYLQMNSLKPEDTAMYYCAAMERRSGRRRMTENAEYKYWGQGTQVTVSSGGGSQVQLQESGGGSVQVGGSLRLSCAASGFTYSSSCLGWFRQAPGKEREGVATIYPAGGNIFYADSVKGRFTISQDNAKNTVYLQMDSLKPEDTAMYYCAARGGQTWGSGGNRCSLWLPAYNYWGQGTQVTVSS

SEQ ID NO: 152 - protein, 254 aa, Artificial Sequence
  Description of Artificial Sequence: Synthetic polypeptide
QVQLQESGGGSVQAGGSLRLSCAASRYTYTNNFMAWFRQAPGKEREGVAAIYTGDGYAYYFDSVKGRFTISQDNDKNMLYLQMNSLKPEDTAMYYCAAMERRSGRRRMTENAEYKYWGQGTQVTVSSGGGSQVQLQESGGGSVQVGGSLRLSCAVSGKLYGGAWFRQAQGKGREGVAAIWIGTGTTFYADSVKGRFTISRDNAKNTVYLQMDGLKPEDTALYYCAADDRPGYRDPLAPVSYNHWGQGTQVTVSS

SEQ ID NO: 153 - protein, 257 aa, Artificial Sequence
  Description of Artificial Sequence: Synthetic polypeptide
QVQLQESGGGSVQAGGSLRLSCAASRYTYTNNFMAWFRQAPGKEREGVAAIYTGDGYAYYFDSVKGRFTISQDNDKNMLYLQMNSLKPEDTAMYYCAAMERRSGRRRMTENAEYKYWGQGTQVTVSSGGGSQVQLQESGGGSVQAGGSLRLSCAASGITYRGVWMGWFRQAPGKEREGVATIYTGSGHTYYADSVKGRFTISQDNAKNTVYLQMNSLKPEDTAMYYCAARTVGGTFYTLAADSFNTWGQGTQVTVSS

SEQ ID NO: 154 - protein, 257 aa, Artificial Sequence
  Description of Artificial Sequence: Synthetic polypeptide
QVQLQESGGGSVQAGGSLRLSCAASRYTYTNNFMAWFRQAPGKEREGVAAIYTGDGYAYYFDSVKGRFTISQDNDKNMLYLQMNSLKPEDTAMYYCAAMERRSGRRRMTENAEYKYWGQGTQVTVSSGGGSQVQLQESGGGSVQDGGSLRLSCAASGDIYARNCMGWFRQAPGKEREKIAVADTGGRSPYYADSVKGRFTISRDNAKNTVDLQMNSLKPEDTAVYYCAAGPLVPVVNTAARCVYEYWGQGTQVTVSS

SEQ ID NO: 155 - protein, 251 aa, Artificial Sequence
  Description of Artificial Sequence: Synthetic polypeptide
QVQLQESGGGSVQAGETLRLSCTVSGFTIDDSEMGWYRQAPGHECELVASGSSDDDTYYVDSVKGRFTISLDNAKNMVYLQMNSLKPEDTAVYYCATGPTYPPKDGDCAHWGQGTQVTVSSGGGSQVQLQESGGGSVQAGGSLRLSCAASGYTYSNRHMGWFRQAPGKEREGVAAIYTGGGSTYYADSVKDRFTISQDNAKNTLYLQMNSLTPEDTAMYYCAADLTRWYSGGWRDPRGYKYWGQGTQVTVS

SEQ ID NO: 156 - protein, 253 aa, Artificial Sequence
  Description of Artificial Sequence: Synthetic polypeptide
QVQLQESGGGSVQAGETLRLSCTVSGFTIDDSEMGWYRQAPGHECELVASGSSDDDTYYVDSVKGRFTISLDNAKNMVYLQMNSLKPEDTAVYYCATGPTYPPKDGDCAHWGQGTQVTVSSGGGSQVQLQESGGGSVQAGGSLRLSCAASGVTYGSYYMAAWFRQAPGKEREGVASIYGGSDSTYYADSVLGRFTISQDNGKNTLYLQMNSLKPDDTAMYYCAAAPPGKWFLKRLEGHNYSYWGQGTQVTVSS

SEQ ID NO: 157 - protein, 256 aa, Artificial Sequence
  Description of Artificial Sequence: Synthetic polypeptide
QVQLQESGGGSVQAGETLRLSCTVSGFTIDDSEMGWYRQAPGHECELVASGSSDDDTYYVDSVKGRFTISLDNAKNMVYLQMNSLKPEDTAVYYCATGPTYPPKDGDCAHWGQGTQVTVSSGGGSQVQLQESGGGSVQVGGSLRLSCAASGFTYSSSCLGWFRQAPGKEREGVATIYPAGGNIFYADSVKGRFTISQDNAKNTVYLQMDSLKPEDTAMYYCAARGGQTWGSGGNRCSLWLPAYNYWGQGTQVTVSS

SEQ ID NO: 158 - protein, 248 aa, Artificial Sequence
  Description of Artificial Sequence: Synthetic polypeptide
QVQLQESGGGSVQAGETLRLSCTVSGFTIDDSEMGWYRQAPGHECELVASGSSDDDTYYVDSVKGRFTISLDNAKNMVYLQMNSLKPEDTAVYYCATGPTYPPKDGDCAHWGQGTQVTVSSGGGSQVQLQESGGGSVQVGGSLRLSCAVSGKLYGGAWFRQAQGKGREGVAAIWIGTGTTFYADSVKGRFTISRDNAKNTVYLQMDGLKPEDTALYYCAADDRPGYRDPLAPVSYNHWGQGTQVTVSS

SEQ ID NO: 159 - protein, 251 aa, Artificial Sequence
  Description of Artificial Sequence: Synthetic polypeptide
QVQLQESGGGSVQAGETLRLSCTVSGFTIDDSEMGWYRQAPGHECELVASGSSDDDTYYVDSVKGRFTISLDNAKNMVYLQMNSLKPEDTAVYYCATGPTYPPKDGDCAHWGQGTQVTVSSGGGSQVQLQESGGGSVQAGGSLRLSCAASGITYRGVWMGWFRQAPGKEREGVATIYTGSGHTYYADSVKGRFTISQDNAKNTVYLQMNSLKPEDTAMYYCAARTVGGTFYTLAADSFNTWGQGTQVTVSS

SEQ ID NO: 160 - protein, 251 aa, Artificial Sequence
  Description of Artificial Sequence: Synthetic polypeptide
QVQLQESGGGSVQAGETLRLSCTVSGFTIDDSEMGWYRQAPGHECELVASGSSDDDTYYVDSVKGRFTISLDNAKNMVYLQMNSLKPEDTAVYYCATGPTYPPKDGDCAHWGQGTQVTVSSGGGSQVQLQESGGGSVQDGGSLRLSCAASGDIYARNCMGWFRQAPGKEREKIAVADTGGRSPYYADSVKGRFTISRDNAKNTVDLQMNSLKPEDTAVYYCAAGPLVPVVNTAARCVYEYWGQGTQVTVSS

SEQ ID NO: 161 - protein, 257 aa, Artificial Sequence
  Description of Artificial Sequence: Synthetic polypeptide
QVQLQESGGGSVQAGGSLRLSCAASGYTYSNRHMGWFRQAPGKEREGVAAIYTGGGSTYYADSVKDRFTISQDNAKNTLYLQMNSLTPEDTAMYYCAADLTRWYSGGWRDPRGYKYWGQGTQVTVSGGGSQVQLQESGGGSVQAGGSLRLSCTASGYTYSSAFMAWFRQAPGKEREGVAAIYTRDGGTVYADSVKGRFTISQDNAKNTLYLQMNSLKAEDTAMYYCAAKIPQPGRASLLDSQTYDYWGQGTQVTVSS

SEQ ID NO: 162 - protein, 256 aa, Artificial Sequence
  Description of Artificial Sequence: Synthetic polypeptide
QVQLQESGGGSVQAGGSLRLSCAASGYTYSNRHMGWFRQAPGKEREGVAAIYTGGGSTYYADSVKDRFTISQDNAKNTLYLQMNSLTPEDTAMYYCAADLTRWYSGGWRDPRGYKYWGQGTQVTVSGGGSQVQLQESGGGSVQAGGSLRLSCAVSGYDYCGYDVRWYRQAPGKEREFVSGIDSDGSTSYADSVKGRFTISQDNAENTSYLHMFSLKPEDTAMYYCKTESPAGESAWCRNFRGMDYWGKGTQVTVSS

SEQ ID NO: 163 - protein, 256 aa, Artificial Sequence
  Description of Artificial Sequence: Synthetic polypeptide
QVQLQESGGGSVQAGGSLRLSCAASGYTYSNRHMGWFRQAPGKEREGVAAIYTGGGSTYYADSVKDRFTISQDNAKNTLYLQMNSLTPEDTAMYYCAADLTRWYSGGWRDPRGYKYWGQGTQVTVSGGGSQVQLQESGGGSVQAGGSLRLSCVASGYSYCGYDMMWYRQAPGKEREFVALITSDYSIRYEDSVEGRFSISRDNAKNTGYLLMSNLTPADTAIYYCKTSTAARESSWCRSRYRVASWGQGTQVTVSS

SEQ ID NO: 164 - protein, 257 aa, Artificial Sequence
  Description of Artificial Sequence: Synthetic polypeptide
QVQLQESGGGSVQAGGSLRLSCAASGYTYSNRHMGWFRQAPGKEREGVAAIYTGGGSTYYADSVKDRFTISQDNAKNTLYLQMNSLTPEDTAMYYCAADLTRWYSGGWRDPRGYKYWGQGTQVTVSGGGSQVQLQESGGGSVQAGGSLRLSCAASRYTYTNNFMAWFRQAPGKEREGVAAIYTGDGYAYYFDSVKGRFTISQDNDKNMLYLQMNSLKPEDTAMYYCAAMERRSGRRRMTENAEYKYWGQGTQVTVSS

SEQ ID NO: 165 - protein, 251 aa, Artificial Sequence
  Description of Artificial Sequence: Synthetic polypeptide
QVQLQESGGGSVQAGGSLRLSCAASGYTYSNRHMGWFRQAPGKEREGVAAIYTGGGSTYYADSVKDRFTISQDNAKNTLYLQMNSLTPEDTAMYYCAADLTRWYSGGWRDPRGYKYWGQGTQVTVSGGGSQVQLQESGGGSVQAGETLRLSCTVSGFTIDDSEMGWYRQAPGHECELVASGSSDDDTYYVDSVKGRFTISLDNAKNMVYLQMNSLKPEDTAVYYCATGPTYPPKDGDCAHWGQGTQVTVSS

SEQ ID NO: 166 - protein, 259 aa, Artificial Sequence
  Description of Artificial Sequence: Synthetic polypeptide
QVQLQESGGGSVQAGGSLRLSCAASGVTYGSYYMAAWFRQAPGKEREGVASIYGGSDSTYYADSVLGRFTISQDNGKNTLYLQMNSLKPDDTAMYYCAAAPPGKWFLKRLEGHNYSYWGQGTQVTVSSGGGSQVQLQESGGGSVQAGGSLRLSCTASGYTYSSAFMAWFRQAPGKEREGVAAIYTRDGGTVYADSVKGRFTISQDNAKNTLYLQMNSLKAEDTAMYYCAAKIPQPGRASLLDSQTYDYWGQGTQVTVSS

SEQ ID NO: 167 - protein, 258 aa, Artificial Sequence
  Description of Artificial Sequence: Synthetic polypeptide
QVQLQESGGGSVQAGGSLRLSCAASGVTYGSYYMAAWFRQAPGKEREGVASIYGGSDSTYYADSVLGRFTISQDNGKNTLYLQMNSLKPDDTAMYYCAAAPPGKWFLKRLEGHNYSYWGQGTQVTVSSGGGSQVQLQESGGGSVQAGGSLRLSCAVSGYDYCGYDVRWYRQAPGKEREFVSGIDSDGSTSYADSVKGRFTISQDNAENTSYLHMFSLKPEDTAMYYCKTESPAGESAWCRNFRGMDYWGKGTQVTVSS

SEQ ID NO: 168 - protein, 258 aa, Artificial Sequence
  Description of Artificial Sequence: Synthetic polypeptide
QVQLQESGGGSVQAGGSLRLSCAASGVTYGSYYMAAWFRQAPGKEREGVASIYGGSDSTYYADSVLGRFTISQDNGKNTLYLQMNSLKPDDTAMYYCAAAPPGKWFLKRLEGHNYSYWGQGTQVTVSSGGGSQVQLQESGGGSVQAGGSLRLSCVASGYSYCGYDMMWYRQAPGKEREFVALITSDYSIRYEDSVEGRFSISRDNAKNTGYLLMSNLTPADTAIYYCKTSTAARESSWCRSRYRVASWGQGTQVTVSS

SEQ ID NO: 169 - protein, 259 aa, Artificial Sequence
  Description of Artificial Sequence: Synthetic polypeptide
QVQLQESGGGSVQAGGSLRLSCAASGVTYGSYYMAAWFRQAPGKEREGVASIYGGSDSTYYADSVLGRFTISQDNGKNTLYLQMNSLKPDDTAMYYCAAAPPGKWFLKRLEGHNYSYWGQGTQVTVSSGGGSQVQLQESGGGSVQAGGSLRLSCAASRYTYTNNFMAWFRQAPGKEREGVAAIYTGDGYAYYFDSVKGRFTISQDNDKNMLYLQMNSLKPEDTAMYYCAAMERRSGRRRMTENAEYKYWGQGTQVTVSS

SEQ ID NO: 170 - protein, 253 aa, Artificial Sequence
  Description of Artificial Sequence: Synthetic polypeptide
QVQLQESGGGSVQAGGSLRLSCAASGVTYGSYYMAAWFRQAPGKEREGVASIYGGSDSTYYADSVLGRFTISQDNGKNTLYLQMNSLKPDDTAMYYCAAAPPGKWFLKRLEGHNYSYWGQGTQVTVSSGGGSQVQLQESGGGSVQAGETLRLSCTVSGFTIDDSEMGWYRQAPGHECELVASGSSDDDTYYVDSVKGRFTISLDNAKNMVYLQMNSLKPEDTAVYYCATGPTYPPKDGDCAHWGQGTQVTVSS

SEQ ID NO: 171 - protein, 262 aa, Artificial Sequence
  Description of Artificial Sequence: Synthetic polypeptide
QVQLQESGGGSVQVGGSLRLSCAASGFTYSSSCLGWFRQAPGKEREGVATIYPAGGNIFYADSVKGRFTISQDNAKNTVYLQMDSLKPEDTAMYYCAARGGQTWGSGGNRCSLWLPAYNYWGQGTQVTVSSGGGSQVQLQESGGGSVQAGGSLRLSCTASGYTYSSAFMAWFRQAPGKEREGVAAIYTRDGGTVYADSVKGRFTISQDNAKNTLYLQMNSLKAEDTAMYYCAAKIPQPGRASLLDSQTYDYWGQGTQVTVSS

SEQ ID NO: 172 - protein, 261 aa, Artificial Sequence
  Description of Artificial Sequence: Synthetic polypeptide
QVQLQESGGGSVQVGGSLRLSCAASGFTYSSSCLGWFRQAPGKEREGVATIYPAGGNIFYADSVKGRFTISQDNAKNTVYLQMDSLKPEDTAMYYCAARGGQTWGSGGNRCSLWLPAYNYWGQGTQVTVSSGGGSQVQLQESGGGSVQAGGSLRLSCAVSGYDYCGYDVRWYRQAPGKEREFVSGIDSDGSTSYADSVKGRFTISQDNAENTSYLHMFSLKPEDTAMYYCKTESPAGESAWCRNFRGMDYWGKGTQVTVSS

SEQ ID NO: 173 - protein, 261 aa, Artificial Sequence
  Description of Artificial Sequence: Synthetic polypeptide
QVQLQESGGGSVQVGGSLRLSCAASGFTYSSSCLGWFRQAPGKEREGVATIYPAGGNIFYADSVKGRFTISQDNAKNTVYLQMDSLKPEDTAMYYCAARGGQTWGSGGNRCSLWLPAYNYWGQGTQVTVSSGGGSQVQLQESGGGSVQAGGSLRLSCVASGYSYCGYDMMWYRQAPGKEREFVALITSDYSIRYEDSVEGRFSISRDNAKNTGYLLMSNLTPADTAIYYCKTSTAARESSWCRSRYRVASWGQGTQVTVSS

SEQ ID NO: 174 - protein, 262 aa, Artificial Sequence
  Description of Artificial Sequence: Synthetic polypeptide
QVQLQESGGGSVQVGGSLRLSCAASGFTYSSSCLGWFRQAPGKEREGVATIYPAGGNIFYADSVKGRFTISQDNAKNTVYLQMDSLKPEDTAMYYCAARGGQTWGSGGNRCSLWLPAYNYWGQGTQVTVSSGGGSQVQLQESGGGSVQAGGSLRLSCAASRYTYTNNFMAWFRQAPGKEREGVAAIYTGDGYAYYFDSVKGRFTISQDNDKNMLYLQMNSLKPEDTAMYYCAAMERRSGRRRMTENAEYKYWGQGTQVTVSS

SEQ ID NO: 175 - protein, 256 aa, Artificial Sequence
  Description of Artificial Sequence: Synthetic polypeptide
QVQLQESGGGSVQVGGSLRLSCAASGFTYSSSCLGWFRQAPGKEREGVATIYPAGGNIFYADSVKGRFTISQDNAKNTVYLQMDSLKPEDTAMYYCAARGGQTWGSGGNRCSLWLPAYNYWGQGTQVTVSSGGGSQVQLQESGGGSVQAGETLRLSCTVSGFTIDDSEMGWYRQAPGHECELVASGSSDDDTYYVDSVKGRFTISLDNAKNMVYLQMNSLKPEDTAVYYCATGPTYPPKDGDCAHWGQGTQVTVSS

SEQ ID NO: 176 - protein, 254 aa, Artificial Sequence
  Description of Artificial Sequence: Synthetic polypeptide
QVQLQESGGGSVQVGGSLRLSCAVSGKLYGGAWFRQAQGKGREGVAAIWIGTGTTFYADSVKGRFTISRDNAKNTVYLQMDGLKPEDTALYYCAADDRPGYRDPLAPVSYNHWGQGTQVTVSSGGGSQVQLQESGGGSVQAGGSLRLSCTASGYTYSSAFMAWFRQAPGKEREGVAAIYTRDGGTVYADSVKGRFTISQDNAKNTLYLQMNSLKAEDTAMYYCAAKIPQPGRASLLDSQTYDYWGQGTQVTVSS

SEQ ID NO: 177 - protein, 253 aa, Artificial Sequence
  Description of Artificial Sequence: Synthetic polypeptide
QVQLQESGGGSVQVGGSLRLSCAVSGKLYGGAWFRQAQGKGREGVAAIWIGTGTTFYADSVKGRFTISRDNAKNTVYLQMDGLKPEDTALYYCAADDRPGYRDPLAPVSYNHWGQGTQVTVSSGGGSQVQLQESGGGSVQAGGSLRLSCAVSGYDYCGYDVRWYRQAPGKEREFVSGIDSDGSTSYADSVKGRFTISQDNAENTSYLHMFSLKPEDTAMYYCKTESPAGESAWCRNFRGMDYWGKGTQVTVSS

SEQ ID NO: 178 - protein, 253 aa, Artificial Sequence
  Description of Artificial Sequence: Synthetic polypeptide
QVQLQESGGGSVQVGGSLRLSCAVSGKLYGGAWFRQAQGKGREGVAAIWIGTGTTFYADSVKGRFTISRDNAKNTVYLQMDGLKPEDTALYYCAADDRPGYRDPLAPVSYNHWGQGTQVTVSSGGGSQVQLQESGGGSVQAGGSLRLSCVASGYSYCGYDMMWYRQAPGKEREFVALITSDYSIRYEDSVEGRFSISRDNAKNTGYLLMSNLTPADTAIYYCKTSTAARESSWCRSRYRVASWGQGTQVTVSS

SEQ ID NO: 179 - protein, 254 aa, Artificial Sequence
  Description of Artificial Sequence: Synthetic polypeptide
QVQLQESGGGSVQVGGSLRLSCAVSGKLYGGAWFRQAQGKGREGVAAIWIGTGTTFYADSVKGRFTISRDNAKNTVYLQMDGLKPEDTALYYCAADDRPGYRDPLAPVSYNHWGQGTQVTVSSGGGSQVQLQESGGGSVQAGGSLRLSCAASRYTYTNNFMAWFRQAPGKEREGVAAIYTGDGYAYYFDSVKGRFTISQDNDKNMLYLQMNSLKPEDTAMYYCAAMERRSGRRRMTENAEYKYWGQGTQVTVSS

SEQ ID NO: 180 - protein, 248 aa, Artificial Sequence
  Description of Artificial Sequence: Synthetic polypeptide
QVQLQESGGGSVQVGGSLRLSCAVSGKLYGGAWFRQAQGKGREGVAAIWIGTGTTFYADSVKGRFTISRDNAKNTVYLQMDGLKPEDTALYYCAADDRPGYRDPLAPVSYNHWGQGTQVTVSSGGGSQVQLQESGGGSVQAGETLRLSCTVSGFTIDDSEMGWYRQAPGHECELVASGSSDDDTYYVDSVKGRFTISLDNAKNMVYLQMNSLKPEDTAVYYCATGPTYPPKDGDCAHWGQGTQVTVSS

SEQ ID NO: 181 - protein, 257 aa, Artificial Sequence
  Description of Artificial Sequence: Synthetic polypeptide
QVQLQESGGGSVQAGGSLRLSCAASGITYRGVWMGWFRQAPGKEREGVATIYTGSGHTYYADSVKGRFTISQDNAKNTVYLQMNSLKPEDTAMYYCAARTVGGTFYTLAADSFNTWGQGTQVTVSSGGGSQVQLQESGGGSVQAGGSLRLSCTASGYTYSSAFMAWFRQAPGKEREGVAAIYTRDGGTVYADSVKGRFTISQDNAKNTLYLQMNSLKAEDTAMYYCAAKIPQPGRASLLDSQTYDYWGQGTQVTVSS

SEQ ID NO: 182 - protein, 256 aa, Artificial Sequence
  Description of Artificial Sequence: Synthetic polypeptide
QVQLQESGGGSVQAGGSLRLSCAASGITYRGVWMGWFRQAPGKEREGVATIYTGSGHTYYADSVKGRFTISQDNAKNTVYLQMNSLKPEDTAMYYCAARTVGGTFYTLAADSFNTWGQGTQVTVSSGGGSQVQLQESGGGSVQAGGSLRLSCAVSGYDYCGYDVRWYRQAPGKEREFVSGIDSDGSTSYADSVKGRFTISQDNAENTSYLHMFSLKPEDTAMYYCKTESPAGESAWCRNFRGMDYWGKGTQVTVSS

SEQ ID NO: 183 - protein, 256 aa, Artificial Sequence
  Description of Artificial Sequence: Synthetic polypeptide
QVQLQESGGGSVQAGGSLRLSCAASGITYRGVWMGWFRQAPGKEREGVATIYTGSGHTYYADSVKGRFTISQDNAKNTVYLQMNSLKPEDTAMYYCAARTVGGTFYTLAADSFNTWGQGTQVTVSSGGGSQVQLQESGGGSVQAGGSLRLSCVASGYSYCGYDMMWYRQAPGKEREFVALITSDYSIRYEDSVEGRFSISRDNAKNTGYLLMSNLTPADTAIYYCKTSTAARESSWCRSRYRVASWGQGTQVTVSS

SEQ ID NO: 184 - protein, 257 aa, Artificial Sequence
  Description of Artificial Sequence: Synthetic polypeptide
QVQLQESGGGSVQAGGSLRLSCAASGITYRGVWMGWFRQAPGKEREGVATIYTGSGHTYYADSVKGRFTISQDNAKNTVYLQMNSLKPEDTAMYYCAARTVGGTFYTLAADSFNTWGQGTQVTVSSGGGSQVQLQESGGGSVQAGGSLRLSCAASRYTYTNNFMAWFRQAPGKEREGVAAIYTGDGYAYYFDSVKGRFTISQDNDKNMLYLQMNSLKPEDTAMYYCAAMERRSGRRRMTENAEYKYWGQGTQVTVSS

SEQ ID NO: 185 - protein, 251 aa, Artificial Sequence
  Description of Artificial Sequence: Synthetic polypeptide
QVQLQESGGGSVQAGGSLRLSCAASGITYRGVWMGWFRQAPGKEREGVATIYTGSGHTYYADSVKGRFTISQDNAKNTVYLQMNSLKPEDTAMYYCAARTVGGTFYTLAADSFNTWGQGTQVTVSSGGGSQVQLQESGGGSVQAGETLRLSCTVSGFTIDDSEMGWYRQAPGHECELVASGSSDDDTYYVDSVKGRFTISLDNAKNMVYLQMNSLKPEDTAVYYCATGPTYPPKDGDCAHWGQGTQVTVSS

SEQ ID NO: 186 - protein, 257 aa, Artificial Sequence
  Description of Artificial Sequence: Synthetic polypeptide
QVQLQESGGGSVQDGGSLRLSCAASGDIYARNCMGWFRQAPGKEREKIAVADTGGRSPYYADSVKGRFTISRDNAKNTVDLQMNSLKPEDTAVYYCAAGPLVPVVNTAARCVYEYWGQGTQVTVSSGGGSQVQLQESGGGSVQAGGSLRLSCTASGYTYSSAFMAWFRQAPGKEREGVAAIYTRDGGTVYADSVKGRFTISQDNAKNTLYLQMNSLKAEDTAMYYCAAKIPQPGRASLLDSQTYDYWGQGTQVTVSS

SEQ ID NO: 187 - protein, 256 aa, Artificial Sequence
  Description of Artificial Sequence: Synthetic polypeptide
QVQLQESGGGSVQDGGSLRLSCAASGDIYARNCMGWFRQAPGKEREKIAVADTGGRSPYYADSVKGRFTISRDNAKNTVDLQMNSLKPEDTAVYYCAAGPLVPVVNTAARCVYEYWGQGTQVTVSSGGGSQVQLQESGGGSVQAGGSLRLSCAVSGYDYCGYDVRWYRQAPGKEREFVSGIDSDGSTSYADSVKGRFTISQDNAENTSYLHMFSLKPEDTAMYYCKTESPAGESAWCRNFRGMDYWGKGTQVTVSS

SEQ ID NO: 188 - protein, 256 aa, Artificial Sequence
  Description of Artificial Sequence: Synthetic polypeptide
QVQLQESGGGSVQDGGSLRLSCAASGDIYARNCMGWFRQAPGKEREKIAVADTGGRSPYYADSVKGRFTISRDNAKNTVDLQMNSLKPEDTAVYYCAAGPLVPVVNTAARCVYEYWGQGTQVTVSSGGGSQVQLQESGGGSVQAGGSLRLSCVASGYSYCGYDMMWYRQAPGKEREFVALITSDYSIRYEDSVEGRFSISRDNAKNTGYLLMSNLTPADTAIYYCKTSTAARESSWCRSRYRVASWGQGTQVTVSS

SEQ ID NO: 189 - protein, 257 aa, Artificial Sequence
  Description of Artificial Sequence: Synthetic polypeptide
QVQLQESGGGSVQDGGSLRLSCAASGDIYARNCMGWFRQAPGKEREKIAVADTGGRSPYYADSVKGRFTISRDNAKNTVDLQMNSLKPEDTAVYYCAAGPLVPVVNTAARCVYEYWGQGTQVTVSSGGGSQVQLQESGGGSVQAGGSLRLSCAASRYTYTNNFMAWFRQAPGKEREGVAAIYTGDGYAYYFDSVKGRFTISQDNDKNMLYLQMNSLKPEDTAMYYCAAMERRSGRRRMTENAEYKYWGQGTQVTVSS

SEQ ID NO: 190 - protein, 251 aa, Artificial Sequence
  Description of Artificial Sequence: Synthetic polypeptide
QVQLQESGGGSVQDGGSLRLSCAASGDIYARNCMGWFRQAPGKEREKIAVADTGGRSPYYADSVKGRFTISRDNAKNTVDLQMNSLKPEDTAVYYCAAGPLVPVVNTAARCVYEYWGQGTQVTVSSGGGSQVQLQESGGGSVQAGETLRLSCTVSGFTIDDSEMGWYRQAPGHECELVASGSSDDDTYYVDSVKGRFTISLDNAKNMVYLQMNSLKPEDTAVYYCATGPTYPPKDGDCAHWGQGTQVTVSS

SEQ ID NO: 191 - protein, 8 aa, Artificial Sequence
  Description of Artificial Sequence: Synthetic peptide
GSGSGSGS

SEQ ID NO: 192 - protein, 263 aa, Artificial Sequence
  Description of Artificial Sequence: Synthetic polypeptide
QVQLQESGGGSVQAGGSLRLSCAASRYLYSIDYMAWFRQSPGKEREPVAVIYTASGATFYPDSVKGRFTISQDNAKMTVYLQMNSLKSEDTAMYYCAAVRKTDSYLFDAQSFTYWGQGTQVTVSSGGGSQVQLQESGGGSVQAGGSLRLSCAASGYTYSSGCMGWFRQAPGKEREAVAAINSDGSTSYADSVKGRFTISKDNAKNTLYLQMNSLKPEDTAMYYCAAEPYCSGGYPRWSVAEFGYWGQGTQVTVSSASHHHHHH

SEQ ID NO: 193 - protein, 261 aa, Artificial Sequence
  Description of Artificial Sequence: Synthetic polypeptide
QVQLQESGGGSVQAGGSLRLSCAASRYLYSIDYMAWFRQSPGKEREPVAVIYTASGATFYPDSVKGRFTISQDNAKMTVYLQMNSLKSEDTAMYYCAAVRKTDSYLFDAQSFTYWGQGTQVTVSSGGGSQVQLQESGGGSVQAGGSLRLSCAASGYTYSSYCMGWFRQAPGKEREGVAHIDSDGSTSYADSVKGRFTISKDNAKNTLYLQMNSLKPEDTAMYYCAADPIPGPGYCDGGPNKYWGQGTQVTVSSASHHHHHH

SEQ ID NO: 194 - protein, 258 aa, Artificial Sequence
  Description of Artificial Sequence: Synthetic polypeptide
QVQLQESGGGSVQAGGSLRLSCAASRYLYSIDYMAWFRQSPGKEREPVAVIYTASGATFYPDSVKGRFTISQDNAKMTVYLQMNSLKSEDTAMYYCAAVRKTDSYLFDAQSFTYWGQGTQVTVSSGGGSQVQLQESGGGSVQAGGSLRLSCAASRYTYNSYCMGWFRQAPGKEREGVATIDSDGMTRYADSVKGRFTISKDNAKNTLYLQMNSLKPEDTAMYYCAADADCTIAAMTTNPLGQGTQVTVSSASHHHHHH

SEQ ID NO: 195 - protein, 262 aa, Artificial Sequence
  Description of Artificial Sequence: Synthetic polypeptide
QVQLQESGGGSVQAGGSLRLSCAASRYLYSIDYMAWFRQSPGKEREPVAVIYTASGATFYPDSVKGRFTISQDNAKMTVYLQMNSLKSEDTAMYYCAAVRKTDSYLFDAQSFTYWGQGTQVTVSSGGGSQVQLQESGGGSVQAGGSLRLSCTVSRYTASVNYMGWFRQAPGKEREGVATIFTGAGTTYYANSVKGRFTISRDNAKNTAYLQMNSLKPEDTAIYYCAVDFRGGLLYRPAYEYTYRGQGTQVTVSSASHHHHHH

SEQ ID NO: 196 - protein, 263 aa, Artificial Sequence
  Description of Artificial Sequence: Synthetic polypeptide
QVQLQESGGGSVQAGGSLRLSCAASRYLYSIDYMAWFRQSPGKEREPVAVIYTASGATFYPDSVKGRFTISQDNAKMTVYLQMNSLKSEDTAMYYCAAVRKTDSYLFDAQSFTYWGQGTQVTVSSGGGSQVQLQESGGGSVEAGGSLRLSCAASGYTHSSYCMGWFRQAPGKEREGVAAIDVDGSTTYADSVKGRFTISKDNAKNTLYLQMNSLKPEDTGMYYCAAEFADCSSNYFLPPGAVRYWGQGTQVTVSSASHHHHHH

SEQ ID NO: 197 - protein, 261 aa, Artificial Sequence
  Description of Artificial Sequence: Synthetic polypeptide
QVQLQESGGGSVQAGGSLRLSCAASRYLYSIDYMAWFRQSPGKEREPVAVIYTASGATFYPDSVKGRFTISQDNAKMTVYLQMNSLKSEDTAMYYCAAVRKTDSYLFDAQSFTYWGQGTQVTVSSGGGSQVQLQESGGGSVQAGGSLRLSCAASGYSYSSYCMGWFRQAPGKEREGVATIDSDGMTRYADSVKGRFTISKDNAKNTLYLQMNSLKPEDTAMYYCAAPLYDCDSGAVGRNPPYWGQGTQVTVSSASHHHHHH

SEQ ID NO: 198 - protein, 259 aa, Artificial Sequence
  Description of Artificial Sequence: Synthetic polypeptide
QVQLQESGGGSVQAGGSLRLSCAASRYLYSIDYMAWFRQSPGKEREPVAVIYTASGATFYPDSVKGRFTISQDNAKMTVYLQMNSLKSEDTAMYYCAAVRKTDSYLFDAQSFTYWGQGTQVTVSSGGGSQVQLQESGGGSVQTGGSLRLSCAASGYTYLRGCMGWFRQAPGKEREGVAVMDVVGDRRSYIDSVKGRFTISRDNAANSVYLQMDNLKPEDTAMYYCTAGPNCVGWRSGLDYWGQGTQVTVSSASHHHHHH

SEQ ID NO: 199 - protein, 267 aa, Artificial Sequence
  Description of Artificial Sequence: Synthetic polypeptide
QVQLQESGGGSVQAGGSLRLSCAASRFTYSSYCMGWFRQAPGKEREGVASIDSDGSTSYTDSVKGRFTISKDNAKNTLYLQMNSLKPEDTAMYYCALDLMSTVVPGFCGFLLSAGMDYWGKGTQVTVSSGGGSQVQLQESGGGSVQAGGSLRLSCAASGYTYSSGCMGWFRQAPGKEREAVAAINSDGSTSYADSVKGRFTISKDNAKNTLYLQMNSLKPEDTAMYYCAAEPYCSGGYPRWSVAEFGYWGQGTQVTVSSASHHHHHH

SEQ ID NO: 200 - protein, 265 aa, Artificial Sequence
  Description of Artificial Sequence: Synthetic polypeptide
QVQLQESGGGSVQAGGSLRLSCAASRFTYSSYCMGWFRQAPGKEREGVASIDSDGSTSYTDSVKGRFTISKDNAKNTLYLQMNSLKPEDTAMYYCALDLMSTVVPGFCGFLLSAGMDYWGKGTQVTVSSGGGSQVQLQESGGGSVQAGGSLRLSCAASGYTYSSYCMGWFRQAPGKEREGVAHIDSDGSTSYADSVKGRFTISKDNAKNTLYLQMNSLKPEDTAMYYCAADPIPGPGYCDGGPNKYWGQGTQVTVSSASHHHHHH

SEQ ID NO: 201 - protein, 262 aa, Artificial Sequence
  Description of Artificial Sequence: Synthetic polypeptide
QVQLQESGGGSVQAGGSLRLSCAASRFTYSSYCMGWFRQAPGKEREGVASIDSDGSTSYTDSVKGRFTISKDNAKNTLYLQMNSLKPEDTAMYYCALDLMSTVVPGFCGFLLSAGMDYWGKGTQVTVSSGGGSQVQLQESGGGSVQAGGSLRLSCAASRYTYNSYCMGWFRQAPGKEREGVATIDSDGMTRYADSVKGRFTISKDNAKNTLYLQMNSLKPEDTAMYYCAADADCTIAAMTTNPLGQGTQVTVSSASHHHHHH

SEQ ID NO: 202 - protein, 266 aa, Artificial Sequence
  Description of Artificial Sequence: Synthetic polypeptide
QVQLQESGGGSVQAGGSLRLSCAASRFTYSSYCMGWFRQAPGKEREGVASIDSDGSTSYTDSVKGRFTISKDNAKNTLYLQMNSLKPEDTAMYYCALDLMSTVVPGFCGFLLSAGMDYWGKGTQVTVSSGGGSQVQLQESGGGSVQAGGSLRLSCTVSRYTASVNYMGWFRQAPGKEREGVATIFTGAGTTYYANSVKGRFTISRDNAKNTAYLQMNSLKPEDTAIYYCAVDFRGGLLYRPAYEYTYRGQGTQVTVSSASHHHHHH

SEQ ID NO: 203 - protein, 267 aa, Artificial Sequence
  Description of Artificial Sequence: Synthetic polypeptide
QVQLQESGGGSVQAGGSLRLSCAASRFTYSSYCMGWFRQAPGKEREGVASIDSDGSTSYTDSVKGRFTISKDNAKNTLYLQMNSLKPEDTAMYYCALDLMSTVVPGFCGFLLSAGMDYWGKGTQVTVSSGGGSQVQLQESGGGSVEAGGSLRLSCAASGYTHSSYCMGWFRQAPGKEREGVAAIDVDGSTTYADSVKGRFTISKDNAKNTLYLQMNSLKPEDTGMYYCAAEFADCSSNYFLPPGAVRYWGQGTQVTVSSASHHHHHH

SEQ ID NO: 204 - protein, 265 aa, Artificial Sequence
  Description of Artificial Sequence: Synthetic polypeptide
QVQLQESGGGSVQAGGSLRLSCAASRFTYSSYCMGWFRQAPGKEREGVASIDSDGSTSYTDSVKGRFTISKDNAKNTLYLQMNSLKPEDTAMYYCALDLMSTVVPGFCGFLLSAGMDYWGKGTQVTVSSGGGSQVQLQESGGGSVQAGGSLRLSCAASGYSYSSYCMGWFRQAPGKEREGVATIDSDGMTRYADSVKGRFTISKDNAKNTLYLQMNSLKPEDTAMYYCAAPLYDCDSGAVGRNPPYWGQGTQVTVSSASHHHHHH

SEQ ID NO: 205 - protein, 263 aa, Artificial Sequence
  Description of Artificial Sequence: Synthetic polypeptide
QVQLQESGGGSVQAGGSLRLSCAASRFTYSSYCMGWFRQAPGKEREGVASIDSDGSTSYTDSVKGRFTISKDNAKNTLYLQMNSLKPEDTAMYYCALDLMSTVVPGFCGFLLSAGMDYWGKGTQVTVSSGGGSQVQLQESGGGSVQTGGSLRLSCAASGYTYLRGCMGWFRQAPGKEREGVAVMDVVGDRRSYIDSVKGRFTISRDNAANSVYLQMDNLKPEDTAMYYCTAGPNCVGWRSGLDYWGQGTQVTVSSASHHHHHH

SEQ ID NO: 206 - protein, 269 aa, Artificial Sequence
  Description of Artificial Sequence: Synthetic polypeptide
QVQLQESGGGSVQAGGSLRLSCAASGYTYSMYCMGWFRQAPGKEREGVAQINSDGSTSYADSVKGRFTISKDNAKNTLYLQMNSLKPEDTAMYYCAADSRVYGGSWYERLCGPYTYEYNYWGQGTQVTVSSGGGSQVQLQESGGGSVQAGGSLRLSCAASGYTYSSGCMGWFRQAPGKEREAVAAINSDGSTSYADSVKGRFTISKDNAKNTLYLQMNSLKPEDTAMYYCAAEPYCSGGYPRWSVAEFGYWGQGTQVTVSSASHHHHHH

SEQ ID NO: 207 - protein, 267 aa, Artificial Sequence
  Description of Artificial Sequence: Synthetic polypeptide
QVQLQESGGGSVQAGGSLRLSCAASGYTYSMYCMGWFRQAPGKEREGVAQINSDGSTSYADSVKGRFTISKDNAKNTLYLQMNSLKPEDTAMYYCAADSRVYGGSWYERLCGPYTYEYNYWGQGTQVTVSSGGGSQVQLQESGGGSVQAGGSLRLSCAASGYTYSSYCMGWFRQAPGKEREGVAHIDSDGSTSYADSVKGRFTISKDNAKNTLYLQMNSLKPEDTAMYYCAADPIPGPGYCDGGPNKYWGQGTQVTVSSASHHHHHH

SEQ ID NO: 208 - protein, 264 aa, Artificial Sequence
  Description of Artificial Sequence: Synthetic polypeptide
QVQLQESGGGSVQAGGSLRLSCAASGYTYSMYCMGWFRQAPGKEREGVAQINSDGSTSYADSVKGRFTISKDNAKNTLYLQMNSLKPEDTAMYYCAADSRVYGGSWYERLCGPYTYEYNYWGQGTQVTVSSGGGSQVQLQESGGGSVQAGGSLRLSCAASRYTYNSYCMGWFRQAPGKEREGVATIDSDGMTRYADSVKGRFTISKDNAKNTLYLQMNSLKPEDTAMYYCAADADCTIAAMTTNPLGQGTQVTVSSASHHHHHH

SEQ ID NO: 209 - protein, 268 aa, Artificial Sequence
  Description of Artificial Sequence: Synthetic polypeptide
QVQLQESGGGSVQAGGSLRLSCAASGYTYSMYCMGWFRQAPGKEREGVAQINSDGSTSYADSVKGRFTISKDNAKNTLYLQMNSLKPEDTAMYYCAADSRVYGGSWYERLCGPYTYEYNYWGQGTQVTVSSGGGSQVQLQESGGGSVQAGGSLRLSCTVSRYTASVNYMGWFRQAPGKEREGVATIFTGAGTTYYANSVKGRFTISRDNAKNTAYLQMNSLKPEDTAIYYCAVDFRGGLLYRPAYEYTYRGQGTQVTVSSASHHHHHH

SEQ ID NO: 210 - protein, 269 aa, Artificial Sequence
  Description of Artificial Sequence: Synthetic polypeptide
QVQLQESGGGSVQAGGSLRLSCAASGYTYSMYCMGWFRQAPGKEREGVAQINSDGSTSYADSVKGRFTISKDNAKNTLYLQMNSLKPEDTAMYYCAADSRVYGGSWYERLCGPYTYEYNYWGQGTQVTVSSGGGSQVQLQESGGGSVEAGGSLRLSCAASGYTHSSYCMGWFRQAPGKEREGVAAIDVDGSTTYADSVKGRFTISKDNAKNTLYLQMNSLKPEDTGMYYCAAEFADCSSNYFLPPGAVRYWGQGTQVTVSSASHHHHHH

SEQ ID NO: 211 - protein, 267 aa, Artificial Sequence
  Description of Artificial Sequence: Synthetic polypeptide
QVQLQESGGGSVQAGGSLRLSCAASGYTYSMYCMGWFRQAPGKEREGVAQINSDGSTSYADSVKGRFTISKDNAKNTLYLQMNSLKPEDTAMYYCAADSRVYGGSWYERLCGPYTYEYNYWGQGTQVTVSSGGGSQVQLQESGGGSVQAGGSLRLSCAASGYSYSSYCMGWFRQAPGKEREGVATIDSDGMTRYADSVKGRFTISKDNAKNTLYLQMNSLKPEDTAMYYCAAPLYDCDSGAVGRNPPYWGQGTQVTVSSASHHHHHH

SEQ ID NO: 212 - protein, 265 aa, Artificial Sequence
  Description of Artificial Sequence: Synthetic polypeptide
QVQLQESGGGSVQAGGSLRLSCAASGYTYSMYCMGWFRQAPGKEREGVAQINSDGSTSYADSVKGRFTISKDNAKNTLYLQMNSLKPEDTAMYYCAADSRVYGGSWYERLCGPYTYEYNYWGQGTQVTVSSGGGSQVQLQESGGGSVQTGGSLRLSCAASGYTYLRGCMGWFRQAPGKEREGVAVMDVVGDRRSYIDSVKGRFTISRDNAANSVYLQMDNLKPEDTAMYYCTAGPNCVGWRSGLDYWGQGTQVTVSSASHHHHHH

SEQ ID NO: 213 - protein, 272 aa, Artificial Sequence
  Description of Artificial Sequence: Synthetic polypeptide
QVQLQESGGGSVQAGGSLRLSCAVSGYAYSTYCMGWFRQAPGKEREGVAAIDSGGSTSYADSVKGRFTISKDNAKNTLYLRMNSLKPEDTAMYYCAAVPPPPDGGSCLFLGPEIKVSKADFRYWGQGTQVTVSSGGGSQVQLQESGGGSVQAGGSLRLSCAASGYTYSSGCMGWFRQAPGKEREAVAAINSDGSTSYADSVKGRFTISKDNAKNTLYLQMNSLKPEDTAMYYCAAEPYCSGGYPRWSVAEFGYWGQGTQVTVSSASHHHHHH

SEQ ID NO: 214 - protein, 270 aa, Artificial Sequence
  Description of Artificial Sequence: Synthetic polypeptide
QVQLQESGGGSVQAGGSLRLSCAVSGYAYSTYCMGWFRQAPGKEREGVAAIDSGGSTSYADSVKGRFTISKDNAKNTLYLRMNSLKPEDTAMYYCAAVPPPPDGGSCLFLGPEIKVSKADFRYWGQGTQVTVSSGGGSQVQLQESGGGSVQAGGSLRLSCAASGYTYSSYCMGWFRQAPGKEREGVAHIDSDGSTSYADSVKGRFTISKDNAKNTLYLQMNSLKPEDTAMYYCAADPIPGPGYCDGGPNKYWGQGTQVTVSSASHHHHHH

SEQ ID NO: 215 - protein, 267 aa, Artificial Sequence
  Description of Artificial Sequence: Synthetic polypeptide
QVQLQESGGGSVQAGGSLRLSCAVSGYAYSTYCMGWFRQAPGKEREGVAAIDSGGSTSYADSVKGRFTISKDNAKNTLYLRMNSLKPEDTAMYYCAAVPPPPDGGSCLFLGPEIKVSKADFRYWGQGTQVTVSSGGGSQVQLQESGGGSVQAGGSLRLSCAASRYTYNSYCMGWFRQAPGKEREGVATIDSDGMTRYADSVKGRFTISKDNAKNTLYLQMNSLKPEDTAMYYCAADADCTIAAMTTNPLGQGTQVTVSSASHHHHHH

SEQ ID NO: 216 - protein, 271 aa, Artificial Sequence
  Description of Artificial Sequence: Synthetic polypeptide
QVQLQESGGGSVQAGGSLRLSCAVSGYAYSTYCMGWFRQAPGKEREGVAAIDSGGSTSYADSVKGRFTISKDNAKNTLYLRMNSLKPEDTAMYYCAAVPPPPDGGSCLFLGPEIKVSKADFRYWGQGTQVTVSSGGGSQVQLQESGGGSVQAGGSLRLSCTVSRYTASVNYMGWFRQAPGKEREGVATIFTGAGTTYYANSVKGRFTISRDNAKNTAYLQMNSLKPEDTAIYYCAVDFRGGLLYRPAYEYTYRGQGTQVTVSSASHHHHHH

SEQ ID NO: 217 - protein, 272 aa, Artificial Sequence
  Description of Artificial Sequence: Synthetic polypeptide
QVQLQESGGGSVQAGGSLRLSCAVSGYAYSTYCMGWFRQAPGKEREGVAAIDSGGSTSYADSVKGRFTISKDNAKNTLYLRMNSLKPEDTAMYYCAAVPPPPDGGSCLFLGPEIKVSKADFRYWGQGTQVTVSSGGGSQVQLQESGGGSVEAGGSLRLSCAASGYTHSSYCMGWFRQAPGKEREGVAAIDVDGSTTYADSVKGRFTISKDNAKNTLYLQMNSLKPEDTGMYYCAAEFADCSSNYFLPPGAVRYWGQGTQVTVSSASHHHHHH

SEQ ID NO: 218 - protein, 270 aa, Artificial Sequence
  Description of Artificial Sequence: Synthetic polypeptide
QVQLQESGGGSVQAGGSLRLSCAVSGYAYSTYCMGWFRQAPGKEREGVAAIDSGGSTSYADSVKGRFTISKDNAKNTLYLRMNSLKPEDTAMYYCAAVPPPPDGGSCLFLGPEIKVSKADFRYWGQGTQVTVSSGGGSQVQLQESGGGSVQAGGSLRLSCAASGYSYSSYCMGWFRQAPGKEREGVATIDSDGMTRYADSVKGRFTISKDNAKNTLYLQMNSLKPEDTAMYYCAAPLYDCDSGAVGRNPPYWGQGTQVTVSSASHHHHHH

SEQ ID NO: 219 - protein, 268 aa, Artificial Sequence
  Description of Artificial Sequence: Synthetic polypeptide
QVQLQESGGGSVQAGGSLRLSCAVSGYAYSTYCMGWFRQAPGKEREGVAAIDSGGSTSYADSVKGRFTISKDNAKNTLYLRMNSLKPEDTAMYYCAAVPPPPDGGSCLFLGPEIKVSKADFRYWGQGTQVTVSSGGGSQVQLQESGGGSVQTGGSLRLSCAASGYTYLRGCMGWFRQAPGKEREGVAVMDVVGDRRSYIDSVKGRFTISRDNAANSVYLQMDNLKPEDTAMYYCTAGPNCVGWRSGLDYWGQGTQVTVSSASHHHHHH

SEQ ID NO: 220 - protein, 265 aa, Artificial Sequence
  Description of Artificial Sequence: Synthetic polypeptide
QVQLQESGGGSVQAGGSLRLSCTVSGYTYSSNCMGWFRQAPGKEREGVATIYTGGGNTYYADSVKGRFTISQDNAKNTVYLQMNNLKPEDTAMYYCAAEPLSRVYGGSCPTPTFDYWGQGTQVTVSSGGGSQVQLQESGGGSVQAGGSLRLSCAASGYTYSSGCMGWFRQAPGKEREAVAAINSDGSTSYADSVKGRFTISKDNAKNTLYLQMNSLKPEDTAMYYCAAEPYCSGGYPRWSVAEFGYWGQGTQVTVSSASHHHHHH

SEQ ID NO: 221 - protein, 263 aa, Artificial Sequence
  Description of Artificial Sequence: Synthetic polypeptide
QVQLQESGGGSVQAGGSLRLSCTVSGYTYSSNCMGWFRQAPGKEREGVATIYTGGGNTYYADSVKGRFTISQDNAKNTVYLQMNNLKPEDTAMYYCAAEPLSRVYGGSCPTPTFDYWGQGTQVTVSSGGGSQVQLQESGGGSVQAGGSLRLSCAASGYTYSSYCMGWFRQAPGKEREGVAHIDSDGSTSYADSVKGRFTISKDNAKNTLYLQMNSLKPEDTAMYYCAADPIPGPGYCDGGPNKYWGQGTQVTVSSASHHHHHH

SEQ ID NO: 222 - protein, 260 aa, Artificial Sequence
  Description of Artificial Sequence: Synthetic polypeptide
QVQLQESGGGSVQAGGSLRLSCTVSGYTYSSNCMGWFRQAPGKEREGVATIYTGGGNTYYADSVKGRFTISQDNAKNTVYLQMNNLKPEDTAMYYCAAEPLSRVYGGSCPTPTFDYWGQGTQVTVSSGGGSQVQLQESGGGSVQAGGSLRLSCAASRYTYNSYCMGWFRQAPGKEREGVATIDSDGMTRYADSVKGRFTISKDNAKNTLYLQMNSLKPEDTAMYYCAADADCTIAAMTTNPLGQGTQVTVSSASHHHHHH

SEQ ID NO: 223 - protein, 264 aa, Artificial Sequence
  Description of Artificial Sequence: Synthetic polypeptide
QVQLQESGGGSVQAGGSLRLSCTVSGYTYSSNCMGWFRQAPGKEREGVATIYTGGGNTYYADSVKGRFTISQDNAKNTVYLQMNNLKPEDTAMYYCAAEPLSRVYGGSCPTPTFDYWGQGTQVTVSSGGGSQVQLQESGGGSVQAGGSLRLSCTVSRYTASVNYMGWFRQAPGKEREGVATIFTGAGTTYYANSVKGRFTISRDNAKNTAYLQMNSLKPEDTAIYYCAVDFRGGLLYRPAYEYTYRGQGTQVTVSSASHHHHHH

SEQ ID NO: 224 - protein, 265 aa, Artificial Sequence
  Description of Artificial Sequence: Synthetic polypeptide
QVQLQESGGGSVQAGGSLRLSCTVSGYTYSSNCMGWFRQAPGKEREGVATIYTGGGNTYYADSVKGRFTISQDNAKNTVYLQMNNLKPEDTAMYYCAAEPLSRVYGGSCPTPTFDYWGQGTQVTVSSGGGSQVQLQESGGGSVEAGGSLRLSCAASGYTHSSYCMGWFRQAPGKEREGVAAIDVDGSTTYADSVKGRFTISKDNAKNTLYLQMNSLKPEDTGMYYCAAEFADCSSNYFLPPGAVRYWGQGTQVTVSSASHHHHHH

SEQ ID NO: 225 - protein, 263 aa, Artificial Sequence
  Description of Artificial Sequence: Synthetic polypeptide
QVQLQESGGGSVQAGGSLRLSCTVSGYTYSSNCMGWFRQAPGKEREGVATIYTGGGNTYYADSVKGRFTISQDNAKNTVYLQMNNLKPEDTAMYYCAAEPLSRVYGGSCPTPTFDYWGQGTQVTVSSGGGSQVQLQESGGGSVQAGGSLRLSCAASGYSYSSYCMGWFRQAPGKEREGVATIDSDGMTRYADSVKGRFTISKDNAKNTLYLQMNSLKPEDTAMYYCAAPLYDCDSGAVGRNPPYWGQGTQVTVSSASHHHHHH

SEQ ID NO: 226 - protein, 261 aa, Artificial Sequence
  Description of Artificial Sequence: Synthetic polypeptide
QVQLQESGGGSVQAGGSLRLSCTVSGYTYSSNCMGWFRQAPGKEREGVATIYTGGGNTYYADSVKGRFTISQDNAKNTVYLQMNNLKPEDTAMYYCAAEPLSRVYGGSCPTPTFDYWGQGTQVTVSSGGGSQVQLQESGGGSVQTGGSLRLSCAASGYTYLRGCMGWFRQAPGKEREGVAVMDVVGDRRSYIDSVKGRFTISRDNAANSVYLQMDNLKPEDTAMYYCTAGPNCVGWRSGLDYWGQGTQVTVSSASHHHHHH

SEQ ID NO: 227 - protein, 264 aa, Artificial Sequence
  Description of Artificial Sequence: Synthetic polypeptide
QVQLQESGGGSVQAGGSLRLSCGASGYTYSSYCMGWFRQVPGKEREGVAVIDSDGSTSYADSVKGRFTISKDNGKNTLYLQMNSLKPEDTAMYYCAADLGHYRPPCGVLYLGMDYWGKGTQVTVSSGGGSQVQLQESGGGSVQAGGSLRLSCAASGYTYSSGCMGWFRQAPGKEREAVAAINSDGSTSYADSVKGRFTISKDNAKNTLYLQMNSLKPEDTAMYYCAAEPYCSGGYPRWSVAEFGYWGQGTQVTVSSASHHHHHH

SEQ ID NO: 228 - protein, 262 aa, Artificial Sequence
  Description of Artificial Sequence: Synthetic polypeptide
QVQLQESGGGSVQAGGSLRLSCGASGYTYSSYCMGWFRQVPGKEREGVAVIDSDGSTSYADSVKGRFTISKDNGKNTLYLQMNSLKPEDTAMYYCAADLGHYRPPCGVLYLGMDYWGKGTQVTVSSGGGSQVQLQESGGGSVQAGGSLRLSCAASGYTYSSYCMGWFRQAPGKEREGVAHIDSDGSTSYADSVKGRFTISKDNAKNTLYLQMNSLKPEDTAMYYCAADPIPGPGYCDGGPNKYWGQGTQVTVSSASHHHHHH

SEQ ID NO: 229 - protein, 259 aa, Artificial Sequence
  Description of Artificial Sequence: Synthetic polypeptide
QVQLQESGGGSVQAGGSLRLSCGASGYTYSSYCMGWFRQVPGKEREGVAVIDSDGSTSYADSVKGRFTISKDNGKNTLYLQMNSLKPEDTAMYYCAADLGHYRPPCGVLYLGMDYWGKGTQVTVSSGGGSQVQLQESGGGSVQAGGSLRLSCAASRYTYNSYCMGWFRQAPGKEREGVATIDSDGMTRYADSVKGRFTISKDNAKNTLYLQMNSLKPEDTAMYYCAADADCTIAAMTTNPLGQGTQVTVSSASHHHHHH

SEQ ID NO: 230 - protein, 263 aa, Artificial Sequence
  Description of Artificial Sequence: Synthetic polypeptide
QVQLQESGGGSVQAGGSLRLSCGASGYTYSSYCMGWFRQVPGKEREGVAVIDSDGSTSYADSVKGRFTISKDNGKNTLYLQMNSLKPEDTAMYYCAADLGHYRPPCGVLYLGMDYWGKGTQVTVSSGGGSQVQLQESGGGSVQAGGSLRLSCTVSRYTASVNYMGWFRQAPGKEREGVATIFTGAGTTYYANSVKGRFTISRDNAKNTAYLQMNSLKPEDTAIYYCAVDFRGGLLYRPAYEYTYRGQGTQVTVSSASHHHHHH

SEQ ID NO: 231 - protein, 264 aa, Artificial Sequence
  Description of Artificial Sequence: Synthetic polypeptide
QVQLQESGGGSVQAGGSLRLSCGASGYTYSSYCMGWFRQVPGKEREGVAVIDSDGSTSYADSVKGRFTISKDNGKNTLYLQMNSLKPEDTAMYYCAADLGHYRPPCGVLYLGMDYWGKGTQVTVSSGGGSQVQLQESGGGSVEAGGSLRLSCAASGYTHSSYCMGWFRQAPGKEREGVAAIDVDGSTTYADSVKGRFTISKDNAKNTLYLQMNSLKPEDTGMYYCAAEFADCSSNYFLPPGAVRYWGQGTQVTVSSASHHHHHH

SEQ ID NO: 232 - protein, 262 aa, Artificial Sequence
  Description of Artificial Sequence: Synthetic polypeptide
QVQLQESGGGSVQAGGSLRLSCGASGYTYSSYCMGWFRQVPGKEREGVAVIDSDGSTSYADSVKGRFTISKDNGKNTLYLQMNSLKPEDTAMYYCAADLGHYRPPCGVLYLGMDYWGKGTQVTVSSGGGSQVQLQESGGGSVQAGGSLRLSCAASGYSYSSYCMGWFRQAPGKEREGVATIDSDGMTRYADSVKGRFTISKDNAKNTLYLQMNSLKPEDTAMYYCAAPLYDCDSGAVGRNPPYWGQGTQVTVSSASHHHHHH

SEQ ID NO: 233 - protein, 260 aa, Artificial Sequence
  Description of Artificial Sequence: Synthetic polypeptide
QVQLQESGGGSVQAGGSLRLSCGASGYTYSSYCMGWFRQVPGKEREGVAVIDSDGSTSYADSVKGRFTISKDNGKNTLYLQMNSLKPEDTAMYYCAADLGHYRPPCGVLYLGMDYWGKGTQVTVSSGGGSQVQLQESGGGSVQTGGSLRLSCAASGYTYLRGCMGWFRQAPGKEREGVAVMDVVGDRRSYIDSVKGRFTISRDNAANSVYLQMDNLKPEDTAMYYCTAGPNCVGWRSGLDYWGQGTQVTVSSASHHHHHH

SEQ ID NO: 234 - protein, 265 aa, Artificial Sequence
  Description of Artificial Sequence: Synthetic polypeptide
QVQLQESGGGSVQAGGSLRLSCAASGYSNCSYDMTWYRQAPGKEREFVSAIHSDGSTRYADSVKGRFFISQDNAKNTVYLQMNSLKPEDTAMYYCKTDPLHCRAHGGSWYSVRANYWGQGTQVTVSSGGGSQVQLQESGGGSVQAGGSLRLSCAASGYTYSSGCMGWFRQAPGKEREAVAAINSDGSTSYADSVKGRFTISKDNAKNTLYLQMNSLKPEDTAMYYCAAEPYCSGGYPRWSVAEFGYWGQGTQVTVSSASHHHHHH

SEQ ID NO: 235 - protein, 263 aa, Artificial Sequence
  Description of Artificial Sequence: Synthetic polypeptide
QVQLQESGGGSVQAGGSLRLSCAASGYSNCSYDMTWYRQAPGKEREFVSAIHSDGSTRYADSVKGRFFISQDNAKNTVYLQMNSLKPEDTAMYYCKTDPLHCRAHGGSWYSVRANYWGQGTQVTVSSGGGSQVQLQESGGGSVQAGGSLRLSCAASGYTYSSYCMGWFRQAPGKEREGVAHIDSDGSTSYADSVKGRFTISKDNAKNTLYLQMNSLKPEDTAMYYCAADPIPGPGYCDGGPNKYWGQGTQVTVSSASHHHHHH

SEQ ID NO: 236 - protein, 260 aa, Artificial Sequence
  Description of Artificial Sequence: Synthetic polypeptide
QVQLQESGGGSVQAGGSLRLSCAASGYSNCSYDMTWYRQAPGKEREFVSAIHSDGSTRYADSVKGRFFISQDNAKNTVYLQMNSLKPEDTAMYYCKTDPLHCRAHGGSWYSVRANYWGQGTQVTVSSGGGSQVQLQESGGGSVQAGGSLRLSCAASRYTYNSYCMGWFRQAPGKEREGVATIDSDGMTRYADSVKGRFTISKDNAKNTLYLQMNSLKPEDTAMYYCAADADCTIAAMTTNPLGQGTQVTVSSASHHHHHH

SEQ ID NO: 237 - protein, 264 aa, Artificial Sequence
  Description of Artificial Sequence: Synthetic polypeptide
QVQLQESGGGSVQAGGSLRLSCAASGYSNCSYDMTWYRQAPGKEREFVSAIHSDGSTRYADSVKGRFFISQDNAKNTVYLQMNSLKPEDTAMYYCKTDPLHCRAHGGSWYSVRANYWGQGTQVTVSSGGGSQVQLQESGGGSVQAGGSLRLSCTVSRYTASVNYMGWFRQAPGKEREGVATIFTGAGTTYYANSVKGRFTISRDNAKNTAYLQMNSLKPEDTAIYYCAVDFRGGLLYRPAYEYTYRGQGTQVTVSSASHHHHHH

SEQ ID NO: 238 - protein, 265 aa, Artificial Sequence
  Description of Artificial Sequence: Synthetic polypeptide
QVQLQESGGGSVQAGGSLRLSCAASGYSNCSYDMTWYRQAPGKEREFVSAIHSDGSTRYADSVKGRFFISQDNAKNTVYLQMNSLKPEDTAMYYCKTDPLHCRAHGGSWYSVRANYWGQGTQVTVSSGGGSQVQLQESGGGSVEAGGSLRLSCAASGYTHSSYCMGWFRQAPGKEREGVAAIDVDGSTTYADSVKGRFTISKDNAKNTLYLQMNSLKPEDTGMYYCAAEFADCSSNYFLPPGAVRYWGQGTQVTVSSASHHHHHH

SEQ ID NO: 239 - protein, 263 aa, Artificial Sequence
  Description of Artificial Sequence: Synthetic polypeptide
QVQLQESGGGSVQAGGSLRLSCAASGYSNCSYDMTWYRQAPGKEREFVSAIHSDGSTRYADSVKGRFFISQDNAKNTVYLQMNSLKPEDTAMYYCKTDPLHCRAHGGSWYSVRANYWGQGTQVTVSSGGGSQVQLQESGGGSVQAGGSLRLSCAASGYSYSSYCMGWFRQAPGKEREGVATIDSDGMTRYADSVKGRFTISKDNAKNTLYLQMNSLKPEDTAMYYCAAPLYDCDSGAVGRNPPYWGQGTQVTVSSASHHHHHH

SEQ ID NO: 240 - protein, 261 aa, Artificial Sequence
  Description of Artificial Sequence: Synthetic polypeptide
QVQLQESGGGSVQAGGSLRLSCAASGYSNCSYDMTWYRQAPGKEREFVSAIHSDGSTRYADSVKGRFFISQDNAKNTVYLQMNSLKPEDTAMYYCKTDPLHCRAHGGSWYSVRANYWGQGTQVTVSSGGGSQVQLQESGGGSVQTGGSLRLSCAASGYTYLRGCMGWFRQAPGKEREGVAVMDVVGDRRSYIDSVKGRFTISRDNAANSVYLQMDNLKPEDTAMYYCTAGPNCVGWRSGLDYWGQGTQVTVSSASHHHHHH

SEQ ID NO: 241 - protein, 263 aa, Artificial Sequence
  Description of Artificial Sequence: Synthetic polypeptide
QVQLQESGGGSVQAGGSLRLSCAASGYTYSSGCMGWFRQAPGKEREAVAAINSDGSTSYADSVKGRFTISKDNAKNTLYLQMNSLKPEDTAMYYCAAEPYCSGGYPRWSVAEFGYWGQGTQVTVSSGGGSQVQLQESGGGSVQAGGSLRLSCAASRYLYSIDYMAWFRQSPGKEREPVAVIYTASGATFYPDSVKGRFTISQDNAKMTVYLQMNSLKSEDTAMYYCAAVRKTDSYLFDAQSFTYWGQGTQVTVSSASHHHHHH

SEQ ID NO: 242 - protein, 267 aa, Artificial Sequence
  Description of Artificial Sequence: Synthetic polypeptide
QVQLQESGGGSVQAGGSLRLSCAASGYTYSSGCMGWFRQAPGKEREAVAAINSDGSTSYADSVKGRFTISKDNAKNTLYLQMNSLKPEDTAMYYCAAEPYCSGGYPRWSVAEFGYWGQGTQVTVSSGGGSQVQLQESGGGSVQAGGSLRLSCAASRFTYSSYCMGWFRQAPGKEREGVASIDSDGSTSYTDSVKGRFTISKDNAKNTLYLQMNSLKPEDTAMYYCALDLMSTVVPGFCGFLLSAGMDYWGKGTQVTVSSASHHHHHH

SEQ ID NO: 243 - protein, 269 aa, Artificial Sequence
  Description of Artificial Sequence: Synthetic polypeptide
QVQLQESGGGSVQAGGSLRLSCAASGYTYSSGCMGWFRQAPGKEREAVAAINSDGSTSYADSVKGRFTISKDNAKNTLYLQMNSLKPEDTAMYYCAAEPYCSGGYPRWSVAEFGYWGQGTQVTVSSGGGSQVQLQESGGGSVQAGGSLRLSCAASGYTYSMYCMGWFRQAPGKEREGVAQINSDGSTSYADSVKGRFTISKDNAKNTLYLQMNSLKPEDTAMYYCAADSRVYGGSWYERLCGPYTYEYNYWGQGTQVTVSSASHHHHHH

SEQ ID NO: 244 - protein, 272 aa, Artificial Sequence
  Description of Artificial Sequence: Synthetic polypeptide
QVQLQESGGGSVQAGGSLRLSCAASGYTYSSGCMGWFRQAPGKEREAVAAINSDGSTSYADSVKGRFTISKDNAKNTLYLQMNSLKPEDTAMYYCAAEPYCSGGYPRWSVAEFGYWGQGTQVTVSSGGGSQVQLQESGGGSVQAGGSLRLSCAVSGYAYSTYCMGWFRQAPGKEREGVAAIDSGGSTSYADSVKGRFTISKDNAKNTLYLRMNSLKPEDTAMYYCAAVPPPPDGGSCLFLGPEIKVSKADFRYWGQGTQVTVSSASHHHHHH

SEQ ID NO: 245 - protein, 265 aa, Artificial Sequence
  Description of Artificial Sequence: Synthetic polypeptide
QVQLQESGGGSVQAGGSLRLSCAASGYTYSSGCMGWFRQAPGKEREAVAAINSDGSTSYADSVKGRFTISKDNAKNTLYLQMNSLKPEDTAMYYCAAEPYCSGGYPRWSVAEFGYWGQGTQVTVSSGGGSQVQLQESGGGSVQAGGSLRLSCTVSGYTYSSNCMGWFRQAPGKEREGVATIYTGGGNTYYADSVKGRFTISQDNAKNTVYLQMNNLKPEDTAMYYCAAEPLSRVYGGSCPTPTFDYWGQGTQVTVSSASHHHHHH

SEQ ID NO: 246 - protein, 264 aa, Artificial Sequence
  Description of Artificial Sequence: Synthetic polypeptide
QVQLQESGGGSVQAGGSLRLSCAASGYTYSSGCMGWFRQAPGKEREAVAAINSDGSTSYADSVKGRFTISKDNAKNTLYLQMNSLKPEDTAMYYCAAEPYCSGGYPRWSVAEFGYWGQGTQVTVSSGGGSQVQLQESGGGSVQAGGSLRLSCGASGYTYSSYCMGWFRQVPGKEREGVAVIDSDGSTSYADSVKGRFTISKDNGKNTLYLQMNSLKPEDTAMYYCAADLGHYRPPCGVLYLGMDYWGKGTQVTVSSASHHHHHH

SEQ ID NO: 247 - protein, 265 aa, Artificial Sequence
  Description of Artificial Sequence: Synthetic polypeptide
QVQLQESGGGSVQAGGSLRLSCAASGYTYSSGCMGWFRQAPGKEREAVAAINSDGSTSYADSVKGRFTISKDNAKNTLYLQMNSLKPEDTAMYYCAAEPYCSGGYPRWSVAEFGYWGQGTQVTVSSGGGSQVQLQESGGGSVQAGGSLRLSCAASGYSNCSYDMTWYRQAPGKEREFVSAIHSDGSTRYADSVKGRFFISQDNAKNTVYLQMNSLKPEDTAMYYCKTDPLHCRAHGGSWYSVRANYWGQGTQVTVSSASHHHHHH

SEQ ID NO: 248 - protein, 261 aa, Artificial Sequence
  Description of Artificial Sequence: Synthetic polypeptide
QVQLQESGGGSVQAGGSLRLSCAASGYTYSSYCMGWFRQAPGKEREGVAHIDSDGSTSYADSVKGRFTISKDNAKNTLYLQMNSLKPEDTAMYYCAADPIPGPGYCDGGPNKYWGQGTQVTVSSGGGSQVQLQESGGGSVQAGGSLRLSCAASRYLYSIDYMAWFRQSPGKEREPVAVIYTASGATFYPDSVKGRFTISQDNAKMTVYLQMNSLKSEDTAMYYCAAVRKTDSYLFDAQSFTYWGQGTQVTVSSASHHHHHH

SEQ ID NO: 249 - protein, 265 aa, Artificial Sequence
  Description of Artificial Sequence: Synthetic polypeptide
QVQLQESGGGSVQAGGSLRLSCAASGYTYSSYCMGWFRQAPGKEREGVAHIDSDGSTSYADSVKGRFTISKDNAKNTLYLQMNSLKPEDTAMYYCAADPIPGPGYCDGGPNKYWGQGTQVTVSSGGGSQVQLQESGGGSVQAGGSLRLSCAASRFTYSSYCMGWFRQAPGKEREGVASIDSDGSTSYTDSVKGRFTISKDNAKNTLYLQMNSLKPEDTAMYYCALDLMSTVVPGFCGFLLSAGMDYWGKGTQVTVSSASHHHHHH

SEQ ID NO: 250 - protein, 267 aa, Artificial Sequence
  Description of Artificial Sequence: Synthetic polypeptide
QVQLQESGGGSVQAGGSLRLSCAASGYTYSSYCMGWFRQAPGKEREGVAHIDSDGSTSYADSVKGRFTISKDNAKNTLYLQMNSLKPEDTAMYYCAADPIPGPGYCDGGPNKYWGQGTQVTVSSGGGSQVQLQESGGGSVQAGGSLRLSCAASGYTYSMYCMGWFRQAPGKEREGVAQINSDGSTSYADSVKGRFTISKDNAKNTLYLQMNSLKPEDTAMYYCAADSRVYGGSWYERLCGPYTYEYNYWGQGTQVTVSSASHHHHHH

SEQ ID NO: 251 - protein, 270 aa, Artificial Sequence
  Description of Artificial Sequence: Synthetic polypeptide
QVQLQESGGGSVQAGGSLRLSCAASGYTYSSYCMGWFRQAPGKEREGVAHIDSDGSTSYADSVKGRFTISKDNAKNTLYLQMNSLKPEDTAMYYCAADPIPGPGYCDGGPNKYWGQGTQVTVSSGGGSQVQLQESGGGSVQAGGSLRLSCAVSGYAYSTYCMGWFRQAPGKEREGVAAIDSGGSTSYADSVKGRFTISKDNAKNTLYLRMNSLKPEDTAMYYCAAVPPPPDGGSCLFLGPEIKVSKADFRYWGQGTQVTVSSASHHHHHH

SEQ ID NO: 252 - protein, 263 aa, Artificial Sequence
  Description of Artificial Sequence: Synthetic polypeptide
QVQLQESGGGSVQAGGSLRLSCAASGYTYSSYCMGWFRQAPGKEREGVAHIDSDGSTSYADSVKGRFTISKDNAKNTLYLQMNSLKPEDTAMYYCAADPIPGPGYCDGGPNKYWGQGTQVTVSSGGGSQVQLQESGGGSVQAGGSLRLSCTVSGYTYSSNCMGWFRQAPGKEREGVATIYTGGGNTYYADSVKGRFTISQDNAKNTVYLQMNNLKPEDTAMYYCAAEPLSRVYGGSCPTPTFDYWGQGTQVTVSSASHHHHHH

SEQ ID NO: 253 - protein, 262 aa, Artificial Sequence
  Description of Artificial Sequence: Synthetic polypeptide
QVQLQESGGGSVQAGGSLRLSCAASGYTYSSYCMGWFRQAPGKEREGVAHIDSDGSTSYADSVKGRFTISKDNAKNTLYLQMNSLKPEDTAMYYCAADPIPGPGYCDGGPNKYWGQGTQVTVSSGGGSQVQLQESGGGSVQAGGSLRLSCGASGYTYSSYCMGWFRQVPGKEREGVAVIDSDGSTSYADSVKGRFTISKDNGKNTLYLQMNSLKPEDTAMYYCAADLGHYRPPCGVLYLGMDYWGKGTQVTVSSASHHHHHH

SEQ ID NO: 254 - protein, 263 aa, Artificial Sequence
  Description of Artificial Sequence: Synthetic polypeptide
QVQLQESGGGSVQAGGSLRLSCAASGYTYSSYCMGWFRQAPGKEREGVAHIDSDGSTSYADSVKGRFTISKDNAKNTLYLQMNSLKPEDTAMYYCAADPIPGPGYCDGGPNKYWGQGTQVTVSSGGGSQVQLQESGGGSVQAGGSLRLSCAASGYSNCSYDMTWYRQAPGKEREFVSAIHSDGSTRYADSVKGRFFISQDNAKNTVYLQMNSLKPEDTAMYYCKTDPLHCRAHGGSWYSVRANYWGQGTQVTVSSASHHHHHH

SEQ ID NO: 255 - protein, 258 aa, Artificial Sequence
  Description of Artificial Sequence: Synthetic polypeptide
QVQLQESGGGSVQAGGSLRLSCAASRYTYNSYCMGWFRQAPGKEREGVATIDSDGMTRYADSVKGRFTISKDNAKNTLYLQMNSLKPEDTAMYYCAADADCTIAAMTTNPLGQGTQVTVSSGGGSQVQLQESGGGSVQAGGSLRLSCAASRYLYSIDYMAWFRQSPGKEREPVAVIYTASGATFYPDSVKGRFTISQDNAKMTVYLQMNSLKSEDTAMYYCAAVRKTDSYLFDAQSFTYWGQGTQVTVSSASHHHHHH

SEQ ID NO: 256 - protein, 262 aa, Artificial Sequence
  Description of Artificial Sequence: Synthetic polypeptide
QVQLQESGGGSVQAGGSLRLSCAASRYTYNSYCMGWFRQAPGKEREGVATIDSDGMTRYADSVKGRFTISKDNAKNTLYLQMNSLKPEDTAMYYCAADADCTIAAMTTNPLGQGTQVTVSSGGGSQVQLQESGGGSVQAGGSLRLSCAASRFTYSSYCMGWFRQAPGKEREGVASIDSDGSTSYTDSVKGRFTISKDNAKNTLYLQMNSLKPEDTAMYYCALDLMSTVVPGFCGFLLSAGMDYWGKGTQVTVSSASHHHHHH

SEQ ID NO: 257 - protein, 264 aa, Artificial Sequence
  Description of Artificial Sequence: Synthetic polypeptide
QVQLQESGGGSVQAGGSLRLSCAASRYTYNSYCMGWFRQAPGKEREGVATIDSDGMTRYADSVKGRFTISKDNAKNTLYLQMNSLKPEDTAMYYCAADADCTIAAMTTNPLGQGTQVTVSSGGGSQVQLQESGGGSVQAGGSLRLSCAASGYTYSMYCMGWFRQAPGKEREGVAQINSDGSTSYADSVKGRFTISKDNAKNTLYLQMNSLKPEDTAMYYCAADSRVYGGSWYERLCGPYTYEYNYWGQGTQVTVSSASHHHHHH

SEQ ID NO: 258 - protein, 267 aa, Artificial Sequence
  Description of Artificial Sequence: Synthetic polypeptide
QVQLQESGGGSVQAGGSLRLSCAASRYTYNSYCMGWFRQAPGKEREGVATIDSDGMTRYADSVKGRFTISKDNAKNTLYLQMNSLKPEDTAMYYCAADADCTIAAMTTNPLGQGTQVTVSSGGGSQVQLQESGGGSVQAGGSLRLSCAVSGYAYSTYCMGWFRQAPGKEREGVAAIDSGGSTSYADSVKGRFTISKDNAKNTLYLRMNSLKPEDTAMYYCAAVPPPPDGGSCLFLGPEIKVSKADFRYWGQGTQVTVSSASHHHHHH

SEQ ID NO: 259 - protein, 260 aa, Artificial Sequence
  Description of Artificial Sequence: Synthetic polypeptide
QVQLQESGGGSVQAGGSLRLSCAASRYTYNSYCMGWFRQAPGKEREGVATIDSDGMTRYADSVKGRFTISKDNAKNTLYLQMNSLKPEDTAMYYCAADADCTIAAMTTNPLGQGTQVTVSSGGGSQVQLQESGGGSVQAGGSLRLSCTVSGYTYSSNCMGWFRQAPGKEREGVATIYTGGGNTYYADSVKGRFTISQDNAKNTVYLQMNNLKPEDTAMYYCAAEPLSRVYGGSCPTPTFDYWGQGTQVTVSSASHHHHHH

SEQ ID NO: 260 - protein, 259 aa, Artificial Sequence
  Description of Artificial Sequence: Synthetic polypeptide
QVQLQESGGGSVQAGGSLRLSCAASRYTYNSYCMGWFRQAPGKEREGVATIDSDGMTRYADSVKGRFTISKDNAKNTLYLQMNSLKPEDTAMYYCAADADCTIAAMTTNPLGQGTQVTVSSGGGSQVQLQESGGGSVQAGGSLRLSCGASGYTYSSYCMGWFRQVPGKEREGVAVIDSDGSTSYADSVKGRFTISKDNGKNTLYLQMNSLKPEDTAMYYCAADLGHYRPPCGVLYLGMDYWGKGTQVTVSSASHHHHHH

SEQ ID NO: 261 - protein, 260 aa, Artificial Sequence
  Description of Artificial Sequence: Synthetic polypeptide
QVQLQESGGGSVQAGGSLRLSCAASRYTYNSYCMGWFRQAPGKEREGVATIDSDGMTRYADSVKGRFTISKDNAKNTLYLQMNSLKPEDTAMYYCAADADCTIAAMTTNPLGQGTQVTVSSGGGSQVQLQESGGGSVQAGGSLRLSCAASGYSNCSYDMTWYRQAPGKEREFVSAIHSDGSTRYADSVKGRFFISQDNAKNTVYLQMNSLKPEDTAMYYCKTDPLHCRAHGGSWYSVRANYWGQGTQVTVSSASHHHHHH

SEQ ID NO: 262 - protein, 262 aa, Artificial Sequence
  Description of Artificial Sequence: Synthetic polypeptide
QVQLQESGGGSVQAGGSLRLSCTVSRYTASVNYMGWFRQAPGKEREGVATIFTGAGTTYYANSVKGRFTISRDNAKNTAYLQMNSLKPEDTAIYYCAVDFRGGLLYRPAYEYTYRGQGTQVTVSSGGGSQVQLQESGGGSVQAGGSLRLSCAASRYLYSIDYMAWFRQSPGKEREPVAVIYTASGATFYPDSVKGRFTISQDNAKMTVYLQMNSLKSEDTAMYYCAAVRKTDSYLFDAQSFTYWGQGTQVTVSSASHHHHHH

SEQ ID NO: 263 - protein, 266 aa, Artificial Sequence
  Description of Artificial Sequence: Synthetic polypeptide
QVQLQESGGGSVQAGGSLRLSCTVSRYTASVNYMGWFRQAPGKEREGVATIFTGAGTTYYANSVKGRFTISRDNAKNTAYLQMNSLKPEDTAIYYCAVDFRGGLLYRPAYEYTYRGQGTQVTVSSGGGSQVQLQESGGGSVQAGGSLRLSCAASRFTYSSYCMGWFRQAPGKEREGVASIDSDGSTSYTDSVKGRFTISKDNAKNTLYLQMNSLKPEDTAMYYCALDLMSTVVPGFCGFLLSAGMDYWGKGTQVTVSSASHHHHHH

SEQ ID NO: 264 - protein, 268 aa, Artificial Sequence
  Description of Artificial Sequence: Synthetic polypeptide
QVQLQESGGGSVQAGGSLRLSCTVSRYTASVNYMGWFRQAPGKEREGVATIFTGAGTTYYANSVKGRFTISRDNAKNTAYLQMNSLKPEDTAIYYCAVDFRGGLLYRPAYEYTYRGQGTQVTVSSGGGSQVQLQESGGGSVQAGGSLRLSCAASGYTYSMYCMGWFRQAPGKEREGVAQINSDGSTSYADSVKGRFTISKDNAKNTLYLQMNSLKPEDTAMYYCAADSRVYGGSWYERLCGPYTYEYNYWGQGTQVTVSSASHHHHHH

SEQ ID NO: 265 - protein, 271 aa, Artificial Sequence
  Description of Artificial Sequence: Synthetic polypeptide
QVQLQESGGGSVQAGGSLRLSCTVSRYTASVNYMGWFRQAPGKEREGVATIFTGAGTTYYANSVKGRFTISRDNAKNTAYLQMNSLKPEDTAIYYCAVDFRGGLLYRPAYEYTYRGQGTQVTVSSGGGSQVQLQESGGGSVQAGGSLRLSCAVSGYAYSTYCMGWFRQAPGKEREGVAAIDSGGSTSYADSVKGRFTISKDNAKNTLYLRMNSLKPEDTAMYYCAAVPPPPDGGSCLFLGPEIKVSKADFRYWGQGTQVTVSSASHHHHHH

SEQ ID NO: 266 - protein, 264 aa, Artificial Sequence
  Description of Artificial Sequence: Synthetic polypeptide
QVQLQESGGGSVQAGGSLRLSCTVSRYTASVNYMGWFRQAPGKEREGVATIFTGAGTTYYANSVKGRFTISRDNAKNTAYLQMNSLKPEDTAIYYCAVDFRGGLLYRPAYEYTYRGQGTQVTVSSGGGSQVQLQESGGGSVQAGGSLRLSCTVSGYTYSSNCMGWFRQAPGKEREGVATIYTGGGNTYYADSVKGRFTISQDNAKNTVYLQMNNLKPEDTAMYYCAAEPLSRVYGGSCPTPTFDYWGQGTQVTVSSASHHHHHH

SEQ ID NO: 267 - protein, 263 aa, Artificial Sequence
  Description of Artificial Sequence: Synthetic polypeptide
QVQLQESGGGSVQAGGSLRLSCTVSRYTASVNYMGWFRQAPGKEREGVATIFTGAGTTYYANSVKGRFTISRDNAKNTAYLQMNSLKPEDTAIYYCAVDFRGGLLYRPAYEYTYRGQGTQVTVSSGGGSQVQLQESGGGSVQAGGSLRLSCGASGYTYSSYCMGWFRQVPGKEREGVAVIDSDGSTSYADSVKGRFTISKDNGKNTLYLQMNSLKPEDTAMYYCAADLGHYRPPCGVLYLGMDYWGKGTQVTVSSASHHHHHH

SEQ ID NO: 268 - protein, 264 aa, Artificial Sequence
  Description of Artificial Sequence: Synthetic polypeptide
QVQLQESGGGSVQAGGSLRLSCTVSRYTASVNYMGWFRQAPGKEREGVATIFTGAGTTYYANSVKGRFTISRDNAKNTAYLQMNSLKPEDTAIYYCAVDFRGGLLYRPAYEYTYRGQGTQVTVSSGGGSQVQLQESGGGSVQAGGSLRLSCAASGYSNCSYDMTWYRQAPGKEREFVSAIHSDGSTRYADSVKGRFFISQDNAKNTVYLQMNSLKPEDTAMYYCKTDPLHCRAHGGSWYSVRANYWGQGTQVTVSSASHHHHHH

SEQ ID NO: 269 - protein, 263 aa, Artificial Sequence
  Description of Artificial Sequence: Synthetic polypeptide
QVQLQESGGGSVEAGGSLRLSCAASGYTHSSYCMGWFRQAPGKEREGVAAIDVDGSTTYADSVKGRFTISKDNAKNTLYLQMNSLKPEDTGMYYCAAEFADCSSNYFLPPGAVRYWGQGTQVTVSSGGGSQVQLQESGGGSVQAGGSLRLSCAASRYLYSIDYMAWFRQSPGKEREPVAVIYTASGATFYPDSVKGRFTISQDNAKMTVYLQMNSLKSEDTAMYYCAAVRKTDSYLFDAQSFTYWGQGTQVTVSSASHHHHHH

SEQ ID NO: 270 - protein, 267 aa, Artificial Sequence
  Description of Artificial Sequence: Synthetic polypeptide
QVQLQESGGGSVEAGGSLRLSCAASGYTHSSYCMGWFRQAPGKEREGVAAIDVDGSTTYADSVKGRFTISKDNAKNTLYLQMNSLKPEDTGMYYCAAEFADCSSNYFLPPGAVRYWGQGTQVTVSSGGGSQVQLQESGGGSVQAGGSLRLSCAASRFTYSSYCMGWFRQAPGKEREGVASIDSDGSTSYTDSVKGRFTISKDNAKNTLYLQMNSLKPEDTAMYYCALDLMSTVVPGFCGFLLSAGMDYWGKGTQVTVSSASHHHHHH

SEQ ID NO: 271 - protein, 269 aa, Artificial Sequence
  Description of Artificial Sequence: Synthetic polypeptide
QVQLQESGGGSVEAGGSLRLSCAASGYTHSSYCMGWFRQAPGKEREGVAAIDVDGSTTYADSVKGRFTISKDNAKNTLYLQMNSLKPEDTGMYYCAAEFADCSSNYFLPPGAVRYWGQGTQVTVSSGGGSQVQLQESGGGSVQAGGSLRLSCAASGYTYSMYCMGWFRQAPGKEREGVAQINSDGSTSYADSVKGRFTISKDNAKNTLYLQMNSLKPEDTAMYYCAADSRVYGGSWYERLCGPYTYEYNYWGQGTQVTVSSASHHHHHH

SEQ ID NO: 272 - protein, 272 aa, Artificial Sequence
  Description of Artificial Sequence: Synthetic polypeptide
QVQLQESGGGSVEAGGSLRLSCAASGYTHSSYCMGWFRQAPGKEREGVAAIDVDGSTTYADSVKGRFTISKDNAKNTLYLQMNSLKPEDTGMYYCAAEFADCSSNYFLPPGAVRYWGQGTQVTVSSGGGSQVQLQESGGGSVQAGGSLRLSCAVSGYAYSTYCMGWFRQAPGKEREGVAAIDSGGSTSYADSVKGRFTISKDNAKNTLYLRMNSLKPEDTAMYYCAAVPPPPDGGSCLFLGPEIKVSKADFRYWGQGTQVTVSSASHHHHHH

SEQ ID NO: 273 - protein, 265 aa, Artificial Sequence
  Description of Artificial Sequence: Synthetic polypeptide
QVQLQESGGGSVEAGGSLRLSCAASGYTHSSYCMGWFRQAPGKEREGVAAIDVDGSTTYADSVKGRFTISKDNAKNTLYLQMNSLKPEDTGMYYCAAEFADCSSNYFLPPGAVRYWGQGTQVTVSSGGGSQVQLQESGGGSVQAGGSLRLSCTVSGYTYSSNCMGWFRQAPGKEREGVATIYTGGGNTYYADSVKGRFTISQDNAKNTVYLQMNNLKPEDTAMYYCAAEPLSRVYGGSCPTPTFDYWGQGTQVTVSSASHHHHHH

SEQ ID NO: 274 - protein, 264 aa, Artificial Sequence
  Description of Artificial Sequence: Synthetic polypeptide
QVQLQESGGGSVEAGGSLRLSCAASGYTHSSYCMGWFRQAPGKEREGVAAIDVDGSTTYADSVKGRFTISKDNAKNTLYLQMNSLKPEDTGMYYCAAEFADCSSNYFLPPGAVRYWGQGTQVTVSSGGGSQVQLQESGGGSVQAGGSLRLSCGASGYTYSSYCMGWFRQVPGKEREGVAVIDSDGSTSYADSVKGRFTISKDNGKNTLYLQMNSLKPEDTAMYYCAADLGHYRPPCGVLYLGMDYWGKGTQVTVSSASHHHHHH

SEQ ID NO: 275 - protein, 265 aa, Artificial Sequence
  Description of Artificial Sequence: Synthetic polypeptide
QVQLQESGGGSVEAGGSLRLSCAASGYTHSSYCMGWFRQAPGKEREGVAAIDVDGSTTYADSVKGRFTISKDNAKNTLYLQMNSLKPEDTGMYYCAAEFADCSSNYFLPPGAVRYWGQGTQVTVSSGGGSQVQLQESGGGSVQAGGSLRLSCAASGYSNCSYDMTWYRQAPGKEREFVSAIHSDGSTRYADSVKGRFFISQDNAKNTVYLQMNSLKPEDTAMYYCKTDPLHCRAHGGSWYSVRANYWGQGTQVTVSSASHHHHHH

SEQ ID NO: 276 - protein, 261 aa, Artificial Sequence
  Description of Artificial Sequence: Synthetic polypeptide
QVQLQESGGGSVQAGGSLRLSCAASGYSYSSYCMGWFRQAPGKEREGVATIDSDGMTRYADSVKGRFTISKDNAKNTLYLQMNSLKPEDTAMYYCAAPLYDCDSGAVGRNPPYWGQGTQVTVSSGGGSQVQLQESGGGSVQAGGSLRLSCAASRYLYSIDYMAWFRQSPGKEREPVAVIYTASGATFYPDSVKGRFTISQDNAKMTVYLQMNSLKSEDTAMYYCAAVRKTDSYLFDAQSFTYWGQGTQVTVSSASHHHHHH

SEQ ID NO: 277 - protein, 265 aa, Artificial Sequence
  Description of Artificial Sequence: Synthetic polypeptide
QVQLQESGGGSVQAGGSLRLSCAASGYSYSSYCMGWFRQAPGKEREGVATIDSDGMTRYADSVKGRFTISKDNAKNTLYLQMNSLKPEDTAMYYCAAPLYDCDSGAVGRNPPYWGQGTQVTVSSGGGSQVQLQESGGGSVQAGGSLRLSCAASRFTYSSYCMGWFRQAPGKEREGVASIDSDGSTSYTDSVKGRFTISKDNAKNTLYLQMNSLKPEDTAMYYCALDLMSTVVPGFCGFLLSAGMDYWGKGTQVTVSSASHHHHHH

SEQ ID NO: 278 - protein, 267 aa, Artificial Sequence
  Description of Artificial Sequence: Synthetic polypeptide
QVQLQESGGGSVQAGGSLRLSCAASGYSYSSYCMGWFRQAPGKEREGVATIDSDGMTRYADSVKGRFTISKDNAKNTLYLQMNSLKPEDTAMYYCAAPLYDCDSGAVGRNPPYWGQGTQVTVSSGGGSQVQLQESGGGSVQAGGSLRLSCAASGYTYSMYCMGWFRQAPGKEREGVAQINSDGSTSYADSVKGRFTISKDNAKNTLYLQMNSLKPEDTAMYYCAADSRVYGGSWYERLCGPYTYEYNYWGQGTQVTVSSASHHHHHH

SEQ ID NO: 279 - protein, 270 aa, Artificial Sequence
  Description of Artificial Sequence: Synthetic polypeptide
QVQLQESGGGSVQAGGSLRLSCAASGYSYSSYCMGWFRQAPGKEREGVATIDSDGMTRYADSVKGRFTISKDNAKNTLYLQMNSLKPEDTAMYYCAAPLYDCDSGAVGRNPPYWGQGTQVTVSSGGGSQVQLQESGGGSVQAGGSLRLSCAVSGYAYSTYCMGWFRQAPGKEREGVAAIDSGGSTSYADSVKGRFTISKDNAKNTLYLRMNSLKPEDTAMYYCAAVPPPPDGGSCLFLGPEIKVSKADFRYWGQGTQVTVSSASHHHHHH

SEQ ID NO: 280 - protein, 263 aa, Artificial Sequence
  Description of Artificial Sequence: Synthetic polypeptide
QVQLQESGGGSVQAGGSLRLSCAASGYSYSSYCMGWFRQAPGKEREGVATIDSDGMTRYADSVKGRFTISKDNAKNTLYLQMNSLKPEDTAMYYCAAPLYDCDSGAVGRNPPYWGQGTQVTVSSGGGSQVQLQESGGGSVQAGGSLRLSCTVSGYTYSSNCMGWFRQAPGKEREGVATIYTGGGNTYYADSVKGRFTISQDNAKNTVYLQMNNLKPEDTAMYYCAAEPLSRVYGGSCPTPTFDYWGQGTQVTVSSASHHHHHH

SEQ ID NO: 281 - protein, 262 aa, Artificial Sequence
  Description of Artificial Sequence: Synthetic polypeptide
QVQLQESGGGSVQAGGSLRLSCAASGYSYSSYCMGWFRQAPGKEREGVATIDSDGMTRYADSVKGRFTISKDNAKNTLYLQMNSLKPEDTAMYYCAAPLYDCDSGAVGRNPPYWGQGTQVTVSSGGGSQVQLQESGGGSVQAGGSLRLSCGASGYTYSSYCMGWFRQVPGKEREGVAVIDSDGSTSYADSVKGRFTISKDNGKNTLYLQMNSLKPEDTAMYYCAADLGHYRPPCGVLYLGMDYWGKGTQVTVSSASHHHHHH

SEQ ID NO: 282 - protein, 263 aa, Artificial Sequence
  Description of Artificial Sequence: Synthetic polypeptide
QVQLQESGGGSVQAGGSLRLSCAASGYSYSSYCMGWFRQAPGKEREGVATIDSDGMTRYADSVKGRFTISKDNAKNTLYLQMNSLKPEDTAMYYCAAPLYDCDSGAVGRNPPYWGQGTQVTVSSGGGSQVQLQESGGGSVQAGGSLRLSCAASGYSNCSYDMTWYRQAPGKEREFVSAIHSDGSTRYADSVKGRFFISQDNAKNTVYLQMNSLKPEDTAMYYCKTDPLHCRAHGGSWYSVRANYWGQGTQVTVSSASHHHHHH

SEQ ID NO: 283 - protein, 259 aa, Artificial Sequence
  Description of Artificial Sequence: Synthetic polypeptide
QVQLQESGGGSVQTGGSLRLSCAASGYTYLRGCMGWFRQAPGKEREGVAVMDVVGDRRSYIDSVKGRFTISRDNAANSVYLQMDNLKPEDTAMYYCTAGPNCVGWRSGLDYWGQGTQVTVSSGGGSQVQLQESGGGSVQAGGSLRLSCAASRYLYSIDYMAWFRQSPGKEREPVAVIYTASGATFYPDSVKGRFTISQDNAKMTVYLQMNSLKSEDTAMYYCAAVRKTDSYLFDAQSFTYWGQGTQVTVSSASHHHHHH

SEQ ID NO: 284 - protein, 263 aa, Artificial Sequence
  Description of Artificial Sequence: Synthetic polypeptide
QVQLQESGGGSVQTGGSLRLSCAASGYTYLRGCMGWFRQAPGKEREGVAVMDVVGDRRSYIDSVKGRFTISRDNAANSVYLQMDNLKPEDTAMYYCTAGPNCVGWRSGLDYWGQGTQVTVSSGGGSQVQLQESGGGSVQAGGSLRLSCAASRFTYSSYCMGWFRQAPGKEREGVASIDSDGSTSYTDSVKGRFTISKDNAKNTLYLQMNSLKPEDTAMYYCALDLMSTVVPGFCGFLLSAGMDYWGKGTQVTVSSASHHHHHH

SEQ ID NO: 285 - protein, 265 aa, Artificial Sequence
  Description of Artificial Sequence: Synthetic polypeptide
QVQLQESGGGSVQTGGSLRLSCAASGYTYLRGCMGWFRQAPGKEREGVAVMDVVGDRRSYIDSVKGRFTISRDNAANSVYLQMDNLKPEDTAMYYCTAGPNCVGWRSGLDYWGQGTQVTVSSGGGSQVQLQESGGGSVQAGGSLRLSCAASGYTYSMYCMGWFRQAPGKEREGVAQINSDGSTSYADSVKGRFTISKDNAKNTLYLQMNSLKPEDTAMYYCAADSRVYGGSWYERLCGPYTYEYNYWGQGTQVTVSSASHHHHHH

SEQ ID NO: 286 - protein, 268 aa, Artificial Sequence
  Description of Artificial Sequence: Synthetic polypeptide
QVQLQESGGGSVQTGGSLRLSCAASGYTYLRGCMGWFRQAPGKEREGVAVMDVVGDRRSYIDSVKGRFTISRDNAANSVYLQMDNLKPEDTAMYYCTAGPNCVGWRSGLDYWGQGTQVTVSSGGGSQVQLQESGGGSVQAGGSLRLSCAVSGYAYSTYCMGWFRQAPGKEREGVAAIDSGGSTSYADSVKGRFTISKDNAKNTLYLRMNSLKPEDTAMYYCAAVPPPPDGGSCLFLGPEIKVSKADFRYWGQGTQVTVSSASHHHHHH

SEQ ID NO: 287 - protein, 261 aa, Artificial Sequence
  Description of Artificial Sequence: Synthetic polypeptide
QVQLQESGGGSVQTGGSLRLSCAASGYTYLRGCMGWFRQAPGKEREGVAVMDVVGDRRSYIDSVKGRFTISRDNAANSVYLQMDNLKPEDTAMYYCTAGPNCVGWRSGLDYWGQGTQVTVSSGGGSQVQLQESGGGSVQAGGSLRLSCTVSGYTYSSNCMGWFRQAPGKEREGVATIYTGGGNTYYADSVKGRFTISQDNAKNTVYLQMNNLKPEDTAMYYCAAEPLSRVYGGSCPTPTFDYWGQGTQVTVSSASHHHHHH

SEQ ID NO: 288 - protein, 260 aa, Artificial Sequence
  Description of Artificial Sequence: Synthetic polypeptide
QVQLQESGGGSVQTGGSLRLSCAASGYTYLRGCMGWFRQAPGKEREGVAVMDVVGDRRSYIDSVKGRFTISRDNAANSVYLQMDNLKPEDTAMYYCTAGPNCVGWRSGLDYWGQGTQVTVSSGGGSQVQLQESGGGSVQAGGSLRLSCGASGYTYSSYCMGWFRQVPGKEREGVAVIDSDGSTSYADSVKGRFTISKDNGKNTLYLQMNSLKPEDTAMYYCAADLGHYRPPCGVLYLGMDYWGKGTQVTVSSASHHHHHH

SEQ ID NO: 289 - protein, 261 aa, Artificial Sequence
  Description of Artificial Sequence: Synthetic polypeptide
QVQLQESGGGSVQTGGSLRLSCAASGYTYLRGCMGWFRQAPGKEREGVAVMDVVGDRRSYIDSVKGRFTISRDNAANSVYLQMDNLKPEDTAMYYCTAGPNCVGWRSGLDYWGQGTQVTVSSGGGSQVQLQESGGGSVQAGGSLRLSCAASGYSNCSYDMTWYRQAPGKEREFVSAIHSDGSTRYADSVKGRFFISQDNAKNTVYLQMNSLKPEDTAMYYCKTDPLHCRAHGGSWYSVRANYWGQGTQVTVSSASHHHHHH

SEQ ID NO: 290 - DNA, 789 bp, Artificial Sequence
  Description of Artificial Sequence: Synthetic polynucleotide
caagtgcagctgcaagagagcggaggaggaagcgtgcaagccggaggctctctgagactgagctgtgccgcctctaggtatctgtacagcatcgactacatggcttggttcagacagagccccggcaaggagagggagccagtggctgtcatctacactgcctccggcgccacattctatccagatagcgtgaagggaaggttcactatcagccaagataacgccaagatgacagtgtatctgcagatgaactctctgaagagcgaggacactgccatgtactactgtgccgccgtgaggaagacagatagctacctcttcgacgcccagagcttcacatactggggccaaggcacacaagtgacagtctcgagcggcggaggatcccaagtgcagctgcaagagagcggcggaggaagcgtgcaagctggaggctctctgaggctgagctgtgctgccagcggctacacttatagcagcggctgtatgggctggttcagacaagcccccggcaaggaaagggaagccgtggccgccatcaattccgatggcagcacaagctacgccgacagcgtgaagggaaggttcacaatcagcaaggacaacgccaagaacacactctatctgcagatgaactctctgaagccagaggacacagccatgtactactgcgccgctgagccttactgtagcggcggctacccaagatggagcgtcgctgagttcggctactggggccaaggcacacaagtgactgtctcgtctgctagccaccatcaccatcaccac

SEQ ID NO: 291 - DNA, 783 bp, Artificial Sequence
  Description of Artificial Sequence: Synthetic polynucleotide
caagtgcagctgcaagagagcggaggaggaagcgtgcaagccggaggctctctgagactgagctgtgccgcctctaggtatctgtacagcatcgactacatggcttggttcagacagagccccggcaaggagagggagccagtggctgtcatctacactgcctccggcgccacattctatccagatagcgtgaagggaaggttcactatcagccaagataacgccaagatgacagtgtatctgcagatgaactctctgaagagcgaggacactgccatgtactactgtgccgccgtgaggaagacagatagctacctcttcgacgcccagagcttcacatactggggccaaggcacacaagtgacagtctcgagcggcggaggatcccaagtgcagctgcaagagagcggaggaggcagcgtccaagccggaggctctctgaggctgagctgtgctgccagcggctacacttacagcagctactgcatgggctggttcagacaagcccccggcaaggagagagagggcgtggctcacatcgacagcgacggctccacaagctacgccgatagcgtgaagggaaggttcacaatctccaaggacaacgccaagaacactctgtacctccagatgaactctctgaagccagaggacactgccatgtactactgtgccgccgatccaattcccggccccggctactgcgatggcggccctaacaagtactggggccaaggcacacaagtgactgtctcgtctgctagccaccatcaccatcaccac

SEQ ID NO: 292 - DNA, 774 bp, Artificial Sequence
  Description of Artificial Sequence: Synthetic polynucleotide
caagtgcagctgcaagagagcggaggaggaagcgtgcaagccggaggctctctgagactgagctgtgccgcctctaggtatctgtacagcatcgactacatggcttggttcagacagagccccggcaaggagagggagccagtggctgtcatctacactgcctccggcgccacattctatccagatagcgtgaagggaaggttcactatcagccaagataacgccaagatgacagtgtatctgcagatgaactctctgaagagcgaggacactgccatgtactactgtgccgccgtgaggaagacagatagctacctcttcgacgcccagagcttcacatactggggccaaggcacacaagtgacagtctcgagcggcggaggatcccaagtgcagctgcaagagtccggaggaggaagcgtgcaagccggcggatctctgagactgagctgtgccgcctctaggtacacttacaacagctactgcatgggctggttcagacaagcccccggcaaggaaagagagggcgtggccactatcgatagcgacggcatgactaggtacgctgatagcgtcaagggaaggttcacaatctccaaggacaatgctaagaacactctgtacctccagatgaactctctgaagccagaggacacagccatgtactactgcgctgccgatgccgactgcactatcgccgccatgactactaatcctctgggccaaggcacacaagtgactgtctcgtctgctagccaccatcaccatcaccac

SEQ ID NO: 293 - DNA, 786 bp, Artificial Sequence
  Description of Artificial Sequence: Synthetic polynucleotide
caagtgcagctgcaagagagcggaggaggaagcgtgcaagccggaggctctctgagactgagctgtgccgcctctaggtatctgtacagcatcgactacatggcttggttcagacagagccccggcaaggagagggagccagtggctgtcatctacactgcctccggcgccacattctatccagatagcgtgaagggaaggttcactatcagccaagataacgccaagatgacagtgtatctgcagatgaactctctgaagagcgaggacactgccatgtactactgtgccgccgtgaggaagacagatagctacctcttcgacgcccagagcttcacatactggggccaaggcacacaagtgacagtctcgagcggcggaggatcccaagtgcagctgcaagagtccggcggaggcagcgtccaagccggaggatctctgaggctgagctgtacagtgagcagatacactgccagcgtgaactacatgggctggttcagacaagcccccggcaaagagagagagggcgtggccacaatcttcactggcgccggcacaacatactacgccaactccgtcaagggaaggttcacaatctctagggacaacgccaagaacactgcctatctgcagatgaactccctcaagccagaggacactgccatctactactgcgccgtggatttcagaggcggactgctgtataggccagcctacgagtacacttataggggccaaggcacacaagtgacagtctcgtctgctagccaccatcaccatcaccac

SEQ ID NO: 294 - DNA, 789 bp, Artificial Sequence
  Description of Artificial Sequence: Synthetic polynucleotide
caagtgcagctgcaagagagcggaggaggaagcgtgcaagccggaggctctctgagactgagctgtgccgcctctaggtatctgtacagcatcgactacatggcttggttcagacagagccccggcaaggagagggagccagtggctgtcatctacactgcctccggcgccacattctatccagatagcgtgaagggaaggttcactatcagccaagataacgccaagatgacagtgtatctgcagatgaactctctgaagagcgaggacactgccatgtactactgtgccgccgtgaggaagacagatagctacctcttcgacgcccagagcttcacatactggggccaaggcacacaagtgacagtctcgagcggcggaggatcccaagtgcagctgcaagagagcggaggaggcagcgtcgaagctggaggatctctgaggctgagctgtgctgccagcggctacactcacagcagctactgtatgggctggttcagacaagcccccggcaaggagagggaaggcgtggctgccatcgacgtggatggcagcactacttacgccgacagcgtgaagggaaggttcactatcagcaaggacaacgccaagaacacactctatctgcagatgaacagcctcaagccagaggacactggcatgtactactgcgccgccgagttcgccgattgcagcagcaactactttctgcctcccggcgccgtcagatattggggccaaggcactcaagtgacagtctcgtctgctagccaccatcaccatcaccac

SEQ ID NO: 295 - DNA, 783 bp, Artificial Sequence
  Description of Artificial Sequence: Synthetic polynucleotide
caagtgcagctgcaagagagcggaggaggaagcgtgcaagccggaggctctctgagactgagctgtgccgcctctaggtatctgtacagcatcgactacatggcttggttcagacagagccccggcaaggagagggagccagtggctgtcatctacactgcctccggcgccacattctatccagatagcgtgaagggaaggttcactatcagccaagataacgccaagatgacagtgtatctgcagatgaactctctgaagagcgaggacactgccatgtactactgtgccgccgtgaggaagacagatagctacctcttcgacgcccagagcttcacatactggggccaaggcacacaagtgacagtctcgagcggcggaggatcccaagtgcagctgcaagagagcggaggaggaagcgtccaagccggaggatctctgagactgagctgcgccgctagtggctactcctacagcagctactgcatgggctggtttaggcaagcccccggcaaggagagagaaggcgtggccactatcgacagcgacggcatgacaaggtacgccgacagcgtgaagggaaggttcacaatcagcaaggacaacgccaagaacacactgtatctgcagatgaactctctgaagccagaggacactgccatgtactactgtgccgctcctctgtacgactgtgatagcggcgctgtgggcagaaatccaccttattggggccaaggcactcaagtgacagtctcgtctgctagccaccatcaccatcaccac

SEQ ID NO: 296 - DNA, 777 bp, Artificial Sequence
  Description of Artificial Sequence: Synthetic polynucleotide
caagtgcagctgcaagagagcggaggaggaagcgtgcaagccggaggctctctgagactgagctgtgccgcctctaggtatctgtacagcatcgactacatggcttggttcagacagagccccggcaaggagagggagccagtggctgtcatctacactgcctccggcgccacattctatccagatagcgtgaagggaaggttcactatcagccaagataacgccaagatgacagtgtatctgcagatgaactctctgaagagcgaggacactgccatgtactactgtgccgccgtgaggaagacagatagctacctcttcgacgcccagagcttcacatactggggccaaggcacacaagtgacagtctcgagcggcggaggatcccaagtgcagctgcaagagagcggaggcggcagcgtgcagactggaggctctctgagactgagctgtgctgccagcggctacacttatctgaggggctgtatgggctggtttaggcaagcccccggcaaggagagagagggcgtggccgtcatggatgtggtgggcgataggagaagctacatcgacagcgtgaagggaaggttcacaatctctagggacaatgccgccaacagcgtctatctgcagatggacaatctgaagccagaggacacagccatgtactactgcactgccggccctaactgtgtgggctggagaagcggactggattactggggccaaggcacacaagtgacagtctcgtctgctagccaccatcaccatcaccac

SEQ ID NO: 297 - DNA, 801 bp, Artificial Sequence
  Description of Artificial Sequence: Synthetic polynucleotide
caagtgcagctgcaagagagcggaggaggaagcgtgcaagccggaggctctctgaggctgagctgtgccgcctctaggttcacatacagcagctactgcatgggctggttcagacaagcccccggcaaagagagagaaggcgtggccagcatcgatagcgatggctccactagctacactgacagcgtgaagggaaggttcactatcagcaaggacaacgccaagaacactctgtatctgcagatgaactctctgaagccagaggacacagccatgtactactgtgccctcgatctgatgagcacagtggtgcccggcttctgtggctttctgctgagcgctggcatggattactggggcaagggcactcaagtgactgtctcgagcggcggaggatcccaagtgcagctgcaagagagcggcggaggaagcgtgcaagctggaggctctctgaggctgagctgtgctgccagcggctacacttatagcagcggctgtatgggctggttcagacaagcccccggcaaggaaagggaagccgtggccgccatcaattccgatggcagcacaagctacgccgacagcgtgaagggaaggttcacaatcagcaaggacaacgccaagaacacactctatctgcagatgaactctctgaagccagaggacacagccatgtactactgcgccgctgagccttactgtagcggcggctacccaagatggagcgtcgctgagttcggctactggggccaaggcacacaagtgactgtctcgtctgctagccaccatcaccatcaccac

SEQ ID NO: 298 - DNA, 795 bp, Artificial Sequence
  Description of Artificial Sequence: Synthetic polynucleotide
caagtgcagctgcaagagagcggaggaggaagcgtgcaagccggaggctctctgaggctgagctgtgccgcctctaggttcacatacagcagctactgcatgggctggttcagacaagcccccggcaaagagagagaaggcgtggccagcatcgatagcgatggctccactagctacactgacagcgtgaagggaaggttcactatcagcaaggacaacgccaagaacactctgtatctgcagatgaactctctgaagccagaggacacagccatgtactactgtgccctcgatctgatgagcacagtggtgcccggcttctgtggctttctgctgagcgctggcatggattactggggcaagggcactcaagtgactgtctcgagcggcggaggatcccaagtgcagctgcaagagagcggaggaggcagcgtccaagccggaggctctctgaggctgagctgtgctgccagcggctacacttacagcagctactgcatgggctggttcagacaagcccccggcaaggagagagagggcgtggctcacatcgacagcgacggctccacaagctacgccgatagcgtgaagggaaggttcacaatctccaaggacaacgccaagaacactctgtacctccagatgaactctctgaagccagaggacactgccatgtactactgtgccgccgatccaattcccggccccggctactgcgatggcggccctaacaagtactggggccaaggcacacaagtgactgtctcgtctgctagccaccatcaccatcaccac

SEQ ID NO: 299 - DNA, 786 bp, Artificial Sequence
  Description of Artificial Sequence: Synthetic polynucleotide
caagtgcagctgcaagagagcggaggaggaagcgtgcaagccggaggctctctgaggctgagctgtgccgcctctaggttcacatacagcagctactgcatgggctggttcagacaagcccccggcaaagagagagaaggcgtggccagcatcgatagcgatggctccactagctacactgacagcgtgaagggaaggttcactatcagcaaggacaacgccaagaacactctgtatctgcagatgaactctctgaagccagaggacacagccatgtactactgtgccctcgatctgatgagcacagtggtgcccggcttctgtggctttctgctgagcgctggcatggattactggggcaagggcactcaagtgactgtctcgagcggcggaggatcccaagtgcagctgcaagagtccggaggaggaagcgtgcaagccggcggatctctgagactgagctgtgccgcctctaggtacacttacaacagctactgcatgggctggttcagacaagcccccggcaaggaaagagagggcgtggccactatcgatagcgacggcatgactaggtacgctgatagcgtcaagggaaggttcacaatctccaaggacaatgctaagaacactctgtacctccagatgaactctctgaagccagaggacacagccatgtactactgcgctgccgatgccgactgcactatcgccgccatgactactaatcctctgggccaaggcacacaagtgactgtctcgtctgctagccaccatcaccatcaccac

SEQ ID NO: 300 - DNA, 798 bp, Artificial Sequence
  Description of Artificial Sequence: Synthetic polynucleotide
caagtgcagctgcaagagagcggaggaggaagcgtgcaagccggaggctctctgaggctgagctgtgccgcctctaggttcacatacagcagctactgcatgggctggttcagacaagcccccggcaaagagagagaaggcgtggccagcatcgatagcgatggctccactagctacactgacagcgtgaagggaaggttcactatcagcaaggacaacgccaagaacactctgtatctgcagatgaactctctgaagccagaggacacagccatgtactactgtgccctcgatctgatgagcacagtggtgcccggcttctgtggctttctgctgagcgctggcatggattactggggcaagggcactcaagtgactgtctcgagcggcggaggatcccaagtgcagctgcaagagtccggcggaggcagcgtccaagccggaggatctctgaggctgagctgtacagtgagcagatacactgccagcgtgaactacatgggctggttcagacaagcccccggcaaagagagagagggcgtggccacaatcttcactggcgccggcacaacatactacgccaactccgtcaagggaaggttcacaatctctagggacaacgccaagaacactgcctatctgcagatgaactccctcaagccagaggacactgccatctactactgcgccgtggatttcagaggcggactgctgtataggccagcctacgagtacacttataggggccaaggcacacaagtgacagtctcgtctgctagccaccatcaccatcaccac

SEQ ID NO: 301 - DNA, 801 bp, Artificial Sequence
  Description of Artificial Sequence: Synthetic polynucleotide
caagtgcagctgcaagagagcggaggaggaagcgtgcaagccggaggctctctgaggctgagctgtgccgcctctaggttcacatacagcagctactgcatgggctggttcagacaagcccccggcaaagagagagaaggcgtggccagcatcgatagcgatggctccactagctacactgacagcgtgaagggaaggttcactatcagcaaggacaacgccaagaacactctgtatctgcagatgaactctctgaagccagaggacacagccatgtactactgtgccctcgatctgatgagcacagtggtgcccggcttctgtggctttctgctgagcgctggcatggattactggggcaagggcactcaagtgactgtctcgagcggcggaggatcccaagtgcagctgcaagagagcggaggaggcagcgtcgaagctggaggatctctgaggctgagctgtgctgccagcggctacactcacagcagctactgtatgggctggttcagacaagcccccggcaaggagagggaaggcgtggctgccatcgacgtggatggcagcactacttacgccgacagcgtgaagggaaggttcactatcagcaaggacaacgccaagaacacactctatctgcagatgaacagcctcaagccagaggacactggcatgtactactgcgccgccgagttcgccgattgcagcagcaactactttctgcctcccggcgccgtcagatattggggccaaggcactcaagtgacagtctcgtctgctagccaccatcaccatcaccac

SEQ ID NO: 302 - DNA, 795 bp, Artificial Sequence
  Description of Artificial Sequence: Synthetic polynucleotide
caagtgcagctgcaagagagcggaggaggaagcgtgcaagccggaggctctctgaggctgagctgtgccgcctctaggttcacatacagcagctactgcatgggctggttcagacaagcccccggcaaagagagagaaggcgtggccagcatcgatagcgatggctccactagctacactgacagcgtgaagggaaggttcactatcagcaaggacaacgccaagaacactctgtatctgcagatgaactctctgaagccagaggacacagccatgtactactgtgccctcgatctgatgagcacagtggtgcccggcttctgtggctttctgctgagcgctggcatggattactggggcaagggcactcaagtgactgtctcgagcggcggaggatcccaagtgcagctgcaagagagcggaggaggaagcgtccaagccggaggatctctgagactgagctgcgccgctagtggctactcctacagcagctactgcatgggctggtttaggcaagcccccggcaaggagagagaaggcgtggccactatcgacagcgacggcatgacaaggtacgccgacagcgtgaagggaaggttcacaatcagcaaggacaacgccaagaacacactgtatctgcagatgaactctctgaagccagaggacactgccatgtactactgtgccgctcctctgtacgactgtgatagcggcgctgtgggcagaaatccaccttattggggccaaggcactcaagtgacagtctcgtctgctagccaccatcaccatcaccac

SEQ ID NO: 303 - DNA, 789 bp, Artificial Sequence
  Description of Artificial Sequence: Synthetic polynucleotide
caagtgcagctgcaagagagcggaggaggaagcgtgcaagccggaggctctctgaggctgagctgtgccgcctctaggttcacatacagcagctactgcatgggctggttcagacaagcccccggcaaagagagagaaggcgtggccagcatcgatagcgatggctccactagctacactgacagcgtgaagggaaggttcactatcagcaaggacaacgccaagaacactctgtatctgcagatgaactctctgaagccagaggacacagccatgtactactgtgccctcgatctgatgagcacagtggtgcccggcttctgtggctttctgctgagcgctggcatggattactggggcaagggcactcaagtgactgtctcgagcggcggaggatcccaagtgcagctgcaagagagcggaggcggcagcgtgcagactggaggctctctgagactgagctgtgctgccagcggctacacttatctgaggggctgtatgggctggtttaggcaagcccccggcaaggagagagagggcgtggccgtcatggatgtggtgggcgataggagaagctacatcgacagcgtgaagggaaggttcacaatctctagggacaatgccgccaacagcgtctatctgcagatggacaatctgaagccagaggacacagccatgtactactgcactgccggccctaactgtgtgggctggagaagcggactggattactggggccaaggcacacaagtgacagtctcgtctgctagccaccatcaccatcaccac

SEQ ID NO: 304 - DNA, 807 bp, Artificial Sequence
  Description of Artificial Sequence: Synthetic polynucleotide
caagtgcagctgcaagagtccggaggaggcagcgtccaagccggaggctctctgaggctgagctgtgctgccagcggctacacttacagcatgtactgcatgggctggttcagacaagcccccggcaaggaaagagagggcgtggcccagatcaatagcgatggcagcacaagctacgccgacagcgtgaagggaaggttcactatctccaaggacaacgccaagaacactctgtatctgcagatgaactctctgaagccagaggacactgccatgtactactgcgctgccgattctagggtgtacggcggcagctggtatgagaggctctgcggcccttacacatacgagtacaactactggggccaaggcacacaagtgactgtctcgagcggcggaggatcccaagtgcagctgcaagagagcggcggaggaagcgtgcaagctggaggctctctgaggctgagctgtgctgccagcggctacacttatagcagcggctgtatgggctggttcagacaagcccccggcaaggaaagggaagccgtggccgccatcaattccgatggcagcacaagctacgccgacagcgtgaagggaaggttcacaatcagcaaggacaacgccaagaacacactctatctgcagatgaactctctgaagccagaggacacagccatgtactactgcgccgctgagccttactgtagcggcggctacccaagatggagcgtcgctgagttcggctactggggccaaggcacacaagtgactgtctcgtctgctagccaccatcaccatcaccac

SEQ ID NO: 305 - DNA, 801 bp, Artificial Sequence
  Description of Artificial Sequence: Synthetic polynucleotide
caagtgcagctgcaagagtccggaggaggcagcgtccaagccggaggctctctgaggctgagctgtgctgccagcggctacacttacagcatgtactgcatgggctggttcagacaagcccccggcaaggaaagagagggcgtggcccagatcaatagcgatggcagcacaagctacgccgacagcgtgaagggaaggttcactatctccaaggacaacgccaagaacactctgtatctgcagatgaactctctgaagccagaggacactgccatgtactactgcgctgccgattctagggtgtacggcggcagctggtatgagaggctctgcggcccttacacatacgagtacaactactggggccaaggcacacaagtgactgtctcgagcggcggaggatcccaagtgcagctgcaagagagcggaggaggcagcgtccaagccggaggctctctgaggctgagctgtgctgccagcggctacacttacagcagctactgcatgggctggttcagacaagcccccggcaaggagagagagggcgtggctcacatcgacagcgacggctccacaagctacgccgatagcgtgaagggaaggttcacaatctccaaggacaacgccaagaacactctgtacctccagatgaactctctgaagccagaggacactgccatgtactactgtgccgccgatccaattcccggccccggctactgcgatggcggccctaacaagtactggggccaaggcacacaagtgactgtctcgtctgctagccaccatcaccatcaccac

SEQ ID NO: 306 - DNA, 792 bp, Artificial Sequence
  Description of Artificial Sequence: Synthetic polynucleotide
caagtgcagctgcaagagtccggaggaggcagcgtccaagccggaggctctctgaggctgagctgtgctgccagcggctacacttacagcatgtactgcatgggctggttcagacaagcccccggcaaggaaagagagggcgtggcccagatcaatagcgatggcagcacaagctacgccgacagcgtgaagggaaggttcactatctccaaggacaacgccaagaacactctgtatctgcagatgaactctctgaagccagaggacactgccatgtactactgcgctgccgattctagggtgtacggcggcagctggtatgagaggctctgcggcccttacacatacgagtacaactactggggccaaggcacacaagtgactgtctcgagcggcggaggatcccaagtgcagctgcaagagtccggaggaggaagcgtgcaagccggcggatctctgagactgagctgtgccgcctctaggtacacttacaacagctactgcatgggctggttcagacaagcccccggcaaggaaagagagggcgtggccactatcgatagcgacggcatgactaggtacgctgatagcgtcaagggaaggttcacaatctccaaggacaatgctaagaacactctgtacctccagatgaactctctgaagccagaggacacagccatgtactactgcgctgccgatgccgactgcactatcgccgccatgactactaatcctctgggccaaggcacacaagtgactgtctcgtctgctagccaccatcaccatcaccac

SEQ ID NO: 307 - DNA, 804 bp, Artificial Sequence
  Description of Artificial Sequence: Synthetic polynucleotide
caagtgcagctgcaagagtccggaggaggcagcgtccaagccggaggctctctgaggctgagctgtgctgccagcggctacacttacagcatgtactgcatgggctggttcagacaagcccccggcaaggaaagagagggcgtggcccagatcaatagcgatggcagcacaagctacgccgacagcgtgaagggaaggttcactatctccaaggacaacgccaagaacactctgtatctgcagatgaactctctgaagccagaggacactgccatgtactactgcgctgccgattctagggtgtacggcggcagctggtatgagaggctctgcggcccttacacatacgagtacaactactggggccaaggcacacaagtgactgtctcgagcggcggaggatcccaagtgcagctgcaagagtccggcggaggcagcgtccaagccggaggatctctgaggctgagctgtacagtgagcagatacactgccagcgtgaactacatgggctggttcagacaagcccccggcaaagagagagagggcgtggccacaatcttcactggcgccggcacaacatactacgccaactccgtcaagggaaggttcacaatctctagggacaacgccaagaacactgcctatctgcagatgaactccctcaagccagaggacactgccatctactactgcgccgtggatttcagaggcggactgctgtataggccagcctacgagtacacttataggggccaaggcacacaagtgacagtctcgtctgctagccaccatcaccatcaccac

SEQ ID NO: 308 - DNA, 807 bp, Artificial Sequence
  Description of Artificial Sequence: Synthetic polynucleotide
caagtgcagctgcaagagtccggaggaggcagcgtccaagccggaggctctctgaggctgagctgtgctgccagcggctacacttacagcatgtactgcatgggctggttcagacaagcccccggcaaggaaagagagggcgtggcccagatcaatagcgatggcagcacaagctacgccgacagcgtgaagggaaggttcactatctccaaggacaacgccaagaacactctgtatctgcagatgaactctctgaagccagaggacactgccatgtactactgcgctgccgattctagggtgtacggcggcagctggtatgagaggctctgcggcccttacacatacgagtacaactactggggccaaggcacacaagtgactgtctcgagcggcggaggatcccaagtgcagctgcaagagagcggaggaggcagcgtcgaagctggaggatctctgaggctgagctgtgctgccagcggctacactcacagcagctactgtatgggctggttcagacaagcccccggcaaggagagggaaggcgtggctgccatcgacgtggatggcagcactacttacgccgacagcgtgaagggaaggttcactatcagcaaggacaacgccaagaacacactctatctgcagatgaacagcctcaagccagaggacactggcatgtactactgcgccgccgagttcgccgattgcagcagcaactactttctgcctcccggcgccgtcagatattggggccaaggcactcaagtgacagtctcgtctgctagccaccatcaccatcaccac

SEQ ID NO: 309 - DNA, 801 bp, Artificial Sequence
  Description of Artificial Sequence: Synthetic polynucleotide
caagtgcagctgcaagagtccggaggaggcagcgtccaagccggaggctctctgaggctgagctgtgctgccagcggctacacttacagcatgtactgcatgggctggttcagacaagcccccggcaaggaaagagagggcgtggcccagatcaatagcgatggcagcacaagctacgccgacagcgtgaagggaaggttcactatctccaaggacaacgccaagaacactctgtatctgcagatgaactctctgaagccagaggacactgccatgtactactgcgctgccgattctagggtgtacggcggcagctggtatgagaggctctgcggcccttacacatacgagtacaactactggggccaaggcacacaagtgactgtctcgagcggcggaggatcccaagtgcagctgcaagagagcggaggaggaagcgtccaagccggaggatctctgagactgagctgcgccgctagtggctactcctacagcagctactgcatgggctggtttaggcaagcccccggcaaggagagagaaggcgtggccactatcgacagcgacggcatgacaaggtacgccgacagcgtgaagggaaggttcacaatcagcaaggacaacgccaagaacacactgtatctgcagatgaactctctgaagccagaggacactgccatgtactactgtgccgctcctctgtacgactgtgatagcggcgctgtgggcagaaatccaccttattggggccaaggcactcaagtgacagtctcgtctgctagccaccatcaccatcaccac

SEQ ID NO: 310 - DNA, 795 bp, Artificial Sequence
  Description of Artificial Sequence: Synthetic polynucleotide
caagtgcagctgcaagagtccggaggaggcagcgtccaagccggaggctctctgaggctgagctgtgctgccagcggctacacttacagcatgtactgcatgggctggttcagacaagcccccggcaaggaaagagagggcgtggcccagatcaatagcgatggcagcacaagctacgccgacagcgtgaagggaaggttcactatctccaaggacaacgccaagaacactctgtatctgcagatgaactctctgaagccagaggacactgccatgtactactgcgctgccgattctagggtgtacggcggcagctggtatgagaggctctgcggcccttacacatacgagtacaactactggggccaaggcacacaagtgactgtctcgagcggcggaggatcccaagtgcagctgcaagagagcggaggcggcagcgtgcagactggaggctctctgagactgagctgtgctgccagcggctacacttatctgaggggctgtatgggctggtttaggcaagcccccggcaaggagagagagggcgtggccgtcatggatgtggtgggcgataggagaagctacatcgacagcgtgaagggaaggttcacaatctctagggacaatgccgccaacagcgtctatctgcagatggacaatctgaagccagaggacacagccatgtactactgcactgccggccctaactgtgtgggctggagaagcggactggattactggggccaaggcacacaagtgacagtctcgtctgctagccaccatcaccatcaccac

SEQ ID NO: 311 - DNA, 816 bp, Artificial Sequence
  Description of Artificial Sequence: Synthetic polynucleotide
caagtgcagctgcaagagagcggcggaggaagcgtgcaagccggaggatctctgagactgagctgcgctgtgagcggctacgcctactccacatactgcatgggctggtttaggcaagcccccggcaaagagagagagggcgtggctgctatcgatagcggcggcagcacaagctacgccgatagcgtgaagggaaggttcacaatcagcaaggacaacgccaagaacacactgtatctgaggatgaactctctgaagccagaggacacagccatgtactactgtgctgctgtgcctcctcctccagatggcggcagctgtctgtttctgggaccagagatcaaggtcagcaaggccgattttaggtactggggccaaggcacacaagtgacagtctcgagcggcggaggatcccaagtgcagctgcaagagagcggcggaggaagcgtgcaagctggaggctctctgaggctgagctgtgctgccagcggctacacttatagcagcggctgtatgggctggttcagacaagcccccggcaaggaaagggaagccgtggccgccatcaattccgatggcagcacaagctacgccgacagcgtgaagggaaggttcacaatcagcaaggacaacgccaagaacacactctatctgcagatgaactctctgaagccagaggacacagccatgtactactgcgccgctgagccttactgtagcggcggctacccaagatggagcgtcgctgagttcggctactggggccaaggcacacaagtgactgtctcgtctgctagccaccatcaccatcaccac

SEQ ID NO: 312 - DNA, 810 bp, Artificial Sequence
  Description of Artificial Sequence: Synthetic polynucleotide
caagtgcagctgcaagagagcggcggaggaagcgtgcaagccggaggatctctgagactgagctgcgctgtgagcggctacgcctactccacatactgcatgggctggtttaggcaagcccccggcaaagagagagagggcgtggctgctatcgatagcggcggcagcacaagctacgccgatagcgtgaagggaaggttcacaatcagcaaggacaacgccaagaacacactgtatctgaggatgaactctctgaagccagaggacacagccatgtactactgtgctgctgtgcctcctcctccagatggcggcagctgtctgtttctgggaccagagatcaaggtcagcaaggccgattttaggtactggggccaaggcacacaagtgacagtctcgagcggcggaggatcccaagtgcagctgcaagagagcggaggaggcagcgtccaagccggaggctctctgaggctgagctgtgctgccagcggctacacttacagcagctactgcatgggctggttcagacaagcccccggcaaggagagagagggcgtggctcacatcgacagcgacggctccacaagctacgccgatagcgtgaagggaaggttcacaatctccaaggacaacgccaagaacactctgtacctccagatgaactctctgaagccagaggacactgccatgtactactgtgccgccgatccaattcccggccccggctactgcgatggcggccctaacaagtactggggccaaggcacacaagtgactgtctcgtctgctagccaccatcaccatcaccac

SEQ ID NO: 313 - DNA, 801 bp, Artificial Sequence
  Description of Artificial Sequence: Synthetic polynucleotide
caagtgcagctgcaagagagcggcggaggaagcgtgcaagccggaggatctctgagactgagctgcgctgtgagcggctacgcctactccacatactgcatgggctggtttaggcaagcccccggcaaagagagagagggcgtggctgctatcgatagcggcggcagcacaagctacgccgatagcgtgaagggaaggttcacaatcagcaaggacaacgccaagaacacactgtatctgaggatgaactctctgaagccagaggacacagccatgtactactgtgctgctgtgcctcctcctccagatggcggcagctgtctgtttctgggaccagagatcaaggtcagcaaggccgattttaggtactggggccaaggcacacaagtgacagtctcgagcggcggaggatcccaagtgcagctgcaagagtccggaggaggaagcgtgcaagccggcggatctctgagactgagctgtgccgcctctaggtacacttacaacagctactgcatgggctggttcagacaagcccccggcaaggaaagagagggcgtggccactatcgatagcgacggcatgactaggtacgctgatagcgtcaagggaaggttcacaatctccaaggacaatgctaagaacactctgtacctccagatgaactctctgaagccagaggacacagccatgtactactgcgctgccgatgccgactgcactatcgccgccatgactactaatcctctgggccaaggcacacaagtgactgtctcgtctgctagccaccatcaccatcaccac

SEQ ID NO: 314 - DNA, 813 bp, Artificial Sequence
  Description of Artificial Sequence: Synthetic polynucleotide
caagtgcagctgcaagagagcggcggaggaagcgtgcaagccggaggatctctgagactgagctgcgctgtgagcggctacgcctactccacatactgcatgggctggtttaggcaagcccccggcaaagagagagagggcgtggctgctatcgatagcggcggcagcacaagctacgccgatagcgtgaagggaaggttcacaatcagcaaggacaacgccaagaacacactgtatctgaggatgaactctctgaagccagaggacacagccatgtactactgtgctgctgtgcctcctcctccagatggcggcagctgtctgtttctgggaccagagatcaaggtcagcaaggccgattttaggtactggggccaaggcacacaagtgacagtctcgagcggcggaggatcccaagtgcagctgcaagagtccggcggaggcagcgtccaagccggaggatctctgaggctgagctgtacagtgagcagatacactgccagcgtgaactacatgggctggttcagacaagcccccggcaaagagagagagggcgtggccacaatcttcactggcgccggcacaacatactacgccaactccgtcaagggaaggttcacaatctctagggacaacgccaagaacactgcctatctgcagatgaactccctcaagccagaggacactgccatctactactgcgccgtggatttcagaggcggactgctgtataggccagcctacgagtacacttataggggccaaggcacacaagtgacagtctcgtctgctagccaccatcaccatcaccac

SEQ ID NO: 315 - DNA, 816 bp, Artificial Sequence
  Description of Artificial Sequence: Synthetic polynucleotide
caagtgcagctgcaagagagcggcggaggaagcgtgcaagccggaggatctctgagactgagctgcgctgtgagcggctacgcctactccacatactgcatgggctggtttaggcaagcccccggcaaagagagagagggcgtggctgctatcgatagcggcggcagcacaagctacgccgatagcgtgaagggaaggttcacaatcagcaaggacaacgccaagaacacactgtatctgaggatgaactctctgaagccagaggacacagccatgtactactgtgctgctgtgcctcctcctccagatggcggcagctgtctgtttctgggaccagagatcaaggtcagcaaggccgattttaggtactggggccaaggcacacaagtgacagtctcgagcggcggaggatcccaagtgcagctgcaagagagcggaggaggcagcgtcgaagctggaggatctctgaggctgagctgtgctgccagcggctacactcacagcagctactgtatgggctggttcagacaagcccccggcaaggagagggaaggcgtggctgccatcgacgtggatggcagcactacttacgccgacagcgtgaagggaaggttcactatcagcaaggacaacgccaagaacacactctatctgcagatgaacagcctcaagccagaggacactggcatgtactactgcgccgccgagttcgccgattgcagcagcaactactttctgcctcccggcgccgtcagatattggggccaaggcactcaagtgacagtctcgtctgctagccaccatcaccatcaccac

SEQ ID NO: 316 - DNA, 810 bp, Artificial Sequence
  Description of Artificial Sequence: Synthetic polynucleotide
caagtgcagctgcaagagagcggcggaggaagcgtgcaagccggaggatctctgagactgagctgcgctgtgagcggctacgcctactccacatactgcatgggctggtttaggcaagcccccggcaaagagagagagggcgtggctgctatcgatagcggcggcagcacaagctacgccgatagcgtgaagggaaggttcacaatcagcaaggacaacgccaagaacacactgtatctgaggatgaactctctgaagccagaggacacagccatgtactactgtgctgctgtgcctcctcctccagatggcggcagctgtctgtttctgggaccagagatcaaggtcagcaaggccgattttaggtactggggccaaggcacacaagtgacagtctcgagcggcggaggatcccaagtgcagctgcaagagagcggaggaggaagcgtccaagccggaggatctctgagactgagctgcgccgctagtggctactcctacagcagctactgcatgggctggtttaggcaagcccccggcaaggagagagaaggcgtggccactatcgacagcgacggcatgacaaggtacgccgacagcgtgaagggaaggttcacaatcagcaaggacaacgccaagaacacactgtatctgcagatgaactctctgaagccagaggacactgccatgtactactgtgccgctcctctgtacgactgtgatagcggcgctgtgggcagaaatccaccttattggggccaaggcactcaagtgacagtctcgtctgctagccaccatcaccatcaccac

SEQ ID NO: 317 - DNA, 804 bp, Artificial Sequence
  Description of Artificial Sequence: Synthetic polynucleotide
caagtgcagctgcaagagagcggcggaggaagcgtgcaagccggaggatctctgagactgagctgcgctgtgagcggctacgcctactccacatactgcatgggctggtttaggcaagcccccggcaaagagagagagggcgtggctgctatcgatagcggcggcagcacaagctacgccgatagcgtgaagggaaggttcacaatcagcaaggacaacgccaagaacacactgtatctgaggatgaactctctgaagccagaggacacagccatgtactactgtgctgctgtgcctcctcctccagatggcggcagctgtctgtttctgggaccagagatcaaggtcagcaaggccgattttaggtactggggccaaggcacacaagtgacagtctcgagcggcggaggatcccaagtgcagctgcaagagagcggaggcggcagcgtgcagactggaggctctctgagactgagctgtgctgccagcggctacacttatctgaggggctgtatgggctggtttaggcaagcccccggcaaggagagagagggcgtggccgtcatggatgtggtgggcgataggagaagctacatcgacagcgtgaagggaaggttcacaatctctagggacaatgccgccaacagcgtctatctgcagatggacaatctgaagccagaggacacagccatgtactactgcactgccggccctaactgtgtgggctggagaagcggactggattactggggccaaggcacacaagtgacagtctcgtctgctagccaccatcaccatcaccac

SEQ ID NO: 318 - DNA, 795 bp, Artificial Sequence
  Description of Artificial Sequence: Synthetic polynucleotide
caagtgcagctgcaagagagcggaggaggaagcgtgcaagccggaggctctctgaggctgagctgtacagtgtccggctacacttacagctccaattgcatgggctggtttaggcaagcccccggcaaggaaagagagggcgtggccactatctacactggcggcggcaacacatactacgccgatagcgtgaagggaaggttcactatcagccaagataacgccaagaacacagtgtatctgcagatgaacaatctgaagccagaggacactgccatgtactactgtgctgctgagccactgtctagggtgtacggcggcagctgcccaactcctacattcgactactggggccaaggcacacaagtgactgtctcgagcggcggaggatcccaagtgcagctgcaagagagcggcggaggaagcgtgcaagctggaggctctctgaggctgagctgtgctgccagcggctacacttatagcagcggctgtatgggctggttcagacaagcccccggcaaggaaagggaagccgtggccgccatcaattccgatggcagcacaagctacgccgacagcgtgaagggaaggttcacaatcagcaaggacaacgccaagaacacactctatctgcagatgaactctctgaagccagaggacacagccatgtactactgcgccgctgagccttactgtagcggcggctacccaagatggagcgtcgctgagttcggctactggggccaaggcacacaagtgactgtctcgtctgctagccaccatcaccatcaccac

SEQ ID NO: 319 - DNA, 789 bp, Artificial Sequence
  Description of Artificial Sequence: Synthetic polynucleotide
caagtgcagctgcaagagagcggaggaggaagcgtgcaagccggaggctctctgaggctgagctgtacagtgtccggctacacttacagctccaattgcatgggctggtttaggcaagcccccggcaaggaaagagagggcgtggccactatctacactggcggcggcaacacatactacgccgatagcgtgaagggaaggttcactatcagccaagataacgccaagaacacagtgtatctgcagatgaacaatctgaagccagaggacactgccatgtactactgtgctgctgagccactgtctagggtgtacggcggcagctgcccaactcctacattcgactactggggccaaggcacacaagtgactgtctcgagcggcggaggatcccaagtgcagctgcaagagagcggaggaggcagcgtccaagccggaggctctctgaggctgagctgtgctgccagcggctacacttacagcagctactgcatgggctggttcagacaagcccccggcaaggagagagagggcgtggctcacatcgacagcgacggctccacaagctacgccgatagcgtgaagggaaggttcacaatctccaaggacaacgccaagaacactctgtacctccagatgaactctctgaagccagaggacactgccatgtactactgtgccgccgatccaattcccggccccggctactgcgatggcggccctaacaagtactggggccaaggcacacaagtgactgtctcgtctgctagccaccatcaccatcaccac

SEQ ID NO: 320 - DNA, 780 bp, Artificial Sequence
  Description of Artificial Sequence: Synthetic polynucleotide
caagtgcagctgcaagagagcggaggaggaagcgtgcaagccggaggctctctgaggctgagctgtacagtgtccggctacacttacagctccaattgcatgggctggtttaggcaagcccccggcaaggaaagagagggcgtggccactatctacactggcggcggcaacacatactacgccgatagcgtgaagggaaggttcactatcagccaagataacgccaagaacacagtgtatctgcagatgaacaatctgaagccagaggacactgccatgtactactgtgctgctgagccactgtctagggtgtacggcggcagctgcccaactcctacattcgactactggggccaaggcacacaagtgactgtctcgagcggcggaggatcccaagtgcagctgcaagagtccggaggaggaagcgtgcaagccggcggatctctgagactgagctgtgccgcctctaggtacacttacaacagctactgcatgggctggttcagacaagcccccggcaaggaaagagagggcgtggccactatcgatagcgacggcatgactaggtacgctgatagcgtcaagggaaggttcacaatctccaaggacaatgctaagaacactctgtacctccagatgaactctctgaagccagaggacacagccatgtactactgcgctgccgatgccgactgcactatcgccgccatgactactaatcctctgggccaaggcacacaagtgactgtctcgtctgctagccaccatcaccatcaccac

SEQ ID NO: 321 - DNA, 792 bp, Artificial Sequence
  Description of Artificial Sequence: Synthetic polynucleotide
caagtgcagctgcaagagagcggaggaggaagcgtgcaagccggaggctctctgaggctgagctgtacagtgtccggctacacttacagctccaattgcatgggctggtttaggcaagcccccggcaaggaaagagagggcgtggccactatctacactggcggcggcaacacatactacgccgatagcgtgaagggaaggttcactatcagccaagataacgccaagaacacagtgtatctgcagatgaacaatctgaagccagaggacactgccatgtactactgtgctgctgagccactgtctagggtgtacggcggcagctgcccaactcctacattcgactactggggccaaggcacacaagtgactgtctcgagcggcggaggatcccaagtgcagctgcaagagtccggcggaggcagcgtccaagccggaggatctctgaggctgagctgtacagtgagcagatacactgccagcgtgaactacatgggctggttcagacaagcccccggcaaagagagagagggcgtggccacaatcttcactggcgccggcacaacatactacgccaactccgtcaagggaaggttcacaatctctagggacaacgccaagaacactgcctatctgcagatgaactccctcaagccagaggacactgccatctactactgcgccgtggatttcagaggcggactgctgtataggccagcctacgagtacacttataggggccaaggcacacaagtgacagtctcgtctgctagccaccatcaccatcaccac

SEQ ID NO: 322 - DNA, 795 bp, Artificial Sequence
  Description of Artificial Sequence: Synthetic polynucleotide
caagtgcagctgcaagagagcggaggaggaagcgtgcaagccggaggctctctgaggctgagctgtacagtgtccggctacacttacagctccaattgcatgggctggtttaggcaagcccccggcaaggaaagagagggcgtggccactatctacactggcggcggcaacacatactacgccgatagcgtgaagggaaggttcactatcagccaagataacgccaagaacacagtgtatctgcagatgaacaatctgaagccagaggacactgccatgtactactgtgctgctgagccactgtctagggtgtacggcggcagctgcccaactcctacattcgactactggggccaaggcacacaagtgactgtctcgagcggcggaggatcccaagtgcagctgcaagagagcggaggaggcagcgtcgaagctggaggatctctgaggctgagctgtgctgccagcggctacactcacagcagctactgtatgggctggttcagacaagcccccggcaaggagagggaaggcgtggctgccatcgacgtggatggcagcactacttacgccgacagcgtgaagggaaggttcactatcagcaaggacaacgccaagaacacactctatctgcagatgaacagcctcaagccagaggacactggcatgtactactgcgccgccgagttcgccgattgcagcagcaactactttctgcctcccggcgccgtcagatattggggccaaggcactcaagtgacagtctcgtctgctagccaccatcaccatcaccac

SEQ ID NO: 323 - DNA, 789 bp, Artificial Sequence
  Description of Artificial Sequence: Synthetic polynucleotide
caagtgcagctgcaagagagcggaggaggaagcgtgcaagccggaggctctctgaggctgagctgtacagtgtccggctacacttacagctccaattgcatgggctggtttaggcaagcccccggcaaggaaagagagggcgtggccactatctacactggcggcggcaacacatactacgccgatagcgtgaagggaaggttcactatcagccaagataacgccaagaacacagtgtatctgcagatgaacaatctgaagccagaggacactgccatgtactactgtgctgctgagccactgtctagggtgtacggcggcagctgcccaactcctacattcgactactggggccaaggcacacaagtgactgtctcgagcggcggaggatcccaagtgcagctgcaagagagcggaggaggaagcgtccaagccggaggatctctgagactgagctgcgccgctagtggctactcctacagcagctactgcatgggctggtttaggcaagcccccggcaaggagagagaaggcgtggccactatcgacagcgacggcatgacaaggtacgccgacagcgtgaagggaaggttcacaatcagcaaggacaacgccaagaacacactgtatctgcagatgaactctctgaagccagaggacactgccatgtactactgtgccgctcctctgtacgactgtgatagcggcgctgtgggcagaaatccaccttattggggccaaggcactcaagtgacagtctcgtctgctagccaccatcaccatcaccac

SEQ ID NO: 324 - DNA, 783 bp, Artificial Sequence
  Description of Artificial Sequence: Synthetic polynucleotide
caagtgcagctgcaagagagcggaggaggaagcgtgcaagccggaggctctctgaggctgagctgtacagtgtccggctacacttacagctccaattgcatgggctggtttaggcaagcccccggcaaggaaagagagggcgtggccactatctacactggcggcggcaacacatactacgccgatagcgtgaagggaaggttcactatcagccaagataacgccaagaacacagtgtatctgcagatgaacaatctgaagccagaggacactgccatgtactactgtgctgctgagccactgtctagggtgtacggcggcagctgcccaactcctacattcgactactggggccaaggcacacaagtgactgtctcgagcggcggaggatcccaagtgcagctgcaagagagcggaggcggcagcgtgcagactggaggctctctgagactgagctgtgctgccagcggctacacttatctgaggggctgtatgggctggtttaggcaagcccccggcaaggagagagagggcgtggccgtcatggatgtggtgggcgataggagaagctacatcgacagcgtgaagggaaggttcacaatctctagggacaatgccgccaacagcgtctatctgcagatggacaatctgaagccagaggacacagccatgtactactgcactgccggccctaactgtgtgggctggagaagcggactggattactggggccaaggcacacaagtgacagtctcgtctgctagccaccatcaccatcaccac

SEQ ID NO: 325 - DNA, 792 bp, Artificial Sequence
  Description of Artificial Sequence: Synthetic polynucleotide
caagtgcagctgcaagagagcggaggaggaagcgtccaagccggaggctctctgaggctgagctgtggagccagcggctacacttacagcagctactgtatgggctggtttaggcaagtgcccggcaaggagagagagggcgtggccgtgatcgattccgatggcagcacaagctacgctgacagcgtgaagggaaggttcacaatcagcaaggacaacggcaagaacacactctatctgcagatgaacagcctcaagccagaggacacagccatgtactactgcgccgctgatctgggccactataggcctccttgtggcgtgctgtatctgggcatggattactggggcaagggcacacaagtgacagtctcgagcggcggaggatcccaagtgcagctgcaagagagcggcggaggaagcgtgcaagctggaggctctctgaggctgagctgtgctgccagcggctacacttatagcagcggctgtatgggctggttcagacaagcccccggcaaggaaagggaagccgtggccgccatcaattccgatggcagcacaagctacgccgacagcgtgaagggaaggttcacaatcagcaaggacaacgccaagaacacactctatctgcagatgaactctctgaagccagaggacacagccatgtactactgcgccgctgagccttactgtagcggcggctacccaagatggagcgtcgctgagttcggctactggggccaaggcacacaagtgactgtctcgtctgctagccaccatcaccatcaccac

SEQ ID NO: 326 - DNA, 786 bp, Artificial Sequence
  Description of Artificial Sequence: Synthetic polynucleotide
caagtgcagctgcaagagagcggaggaggaagcgtccaagccggaggctctctgaggctgagctgtggagccagcggctacacttacagcagctactgtatgggctggtttaggcaagtgcccggcaaggagagagagggcgtggccgtgatcgattccgatggcagcacaagctacgctgacagcgtgaagggaaggttcacaatcagcaaggacaacggcaagaacacactctatctgcagatgaacagcctcaagccagaggacacagccatgtactactgcgccgctgatctgggccactataggcctccttgtggcgtgctgtatctgggcatggattactggggcaagggcacacaagtgacagtctcgagcggcggaggatcccaagtgcagctgcaagagagcggaggaggcagcgtccaagccggaggctctctgaggctgagctgtgctgccagcggctacacttacagcagctactgcatgggctggttcagacaagcccccggcaaggagagagagggcgtggctcacatcgacagcgacggctccacaagctacgccgatagcgtgaagggaaggttcacaatctccaaggacaacgccaagaacactctgtacctccagatgaactctctgaagccagaggacactgccatgtactactgtgccgccgatccaattcccggccccggctactgcgatggcggccctaacaagtactggggccaaggcacacaagtgactgtctcgtctgctagccaccatcaccatcaccac

SEQ ID NO: 327 - DNA, 777 bp, Artificial Sequence
  Description of Artificial Sequence: Synthetic polynucleotide
caagtgcagctgcaagagagcggaggaggaagcgtccaagccggaggctctctgaggctgagctgtggagccagcggctacacttacagcagctactgtatgggctggtttaggcaagtgcccggcaaggagagagagggcgtggccgtgatcgattccgatggcagcacaagctacgctgacagcgtgaagggaaggttcacaatcagcaaggacaacggcaagaacacactctatctgcagatgaacagcctcaagccagaggacacagccatgtactactgcgccgctgatctgggccactataggcctccttgtggcgtgctgtatctgggcatggattactggggcaagggcacacaagtgacagtctcgagcggcggaggatcccaagtgcagctgcaagagtccggaggaggaagcgtgcaagccggcggatctctgagactgagctgtgccgcctctaggtacacttacaacagctactgcatgggctggttcagacaagcccccggcaaggaaagagagggcgtggccactatcgatagcgacggcatgactaggtacgctgatagcgtcaagggaaggttcacaatctccaaggacaatgctaagaacactctgtacctccagatgaactctctgaagccagaggacacagccatgtactactgcgctgccgatgccgactgcactatcgccgccatgactactaatcctctgggccaaggcacacaagtgactgtctcgtctgctagccaccatcaccatcaccac

SEQ ID NO: 328 - DNA, 789 bp, Artificial Sequence
  Description of Artificial Sequence: Synthetic polynucleotide
caagtgcagctgcaagagagcggaggaggaagcgtccaagccggaggctctctgaggctgagctgtggagccagcggctacacttacagcagctactgtatgggctggtttaggcaagtgcccggcaaggagagagagggcgtggccgtgatcgattccgatggcagcacaagctacgctgacagcgtgaagggaaggttcacaatcagcaaggacaacggcaagaacacactctatctgcagatgaacagcctcaagccagaggacacagccatgtactactgcgccgctgatctgggccactataggcctccttgtggcgtgctgtatctgggcatggattactggggcaagggcacacaagtgacagtctcgagcggcggaggatcccaagtgcagctgcaagagtccggcggaggcagcgtccaagccggaggatctctgaggctgagctgtacagtgagcagatacactgccagcgtgaactacatgggctggttcagacaagcccccggcaaagagagagagggcgtggccacaatcttcactggcgccggcacaacatactacgccaactccgtcaagggaaggttcacaatctctagggacaacgccaagaacactgcctatctgcagatgaactccctcaagccagaggacactgccatctactactgcgccgtggatttcagaggcggactgctgtataggccagcctacgagtacacttataggggccaaggcacacaagtgacagtctcgtctgctagccaccatcaccatcaccac

SEQ ID NO: 329 - DNA, 792 bp, Artificial Sequence
  Description of Artificial Sequence: Synthetic polynucleotide
caagtgcagctgcaagagagcggaggaggaagcgtccaagccggaggctctctgaggctgagctgtggagccagcggctacacttacagcagctactgtatgggctggtttaggcaagtgcccggcaaggagagagagggcgtggccgtgatcgattccgatggcagcacaagctacgctgacagcgtgaagggaaggttcacaatcagcaaggacaacggcaagaacacactctatctgcagatgaacagcctcaagccagaggacacagccatgtactactgcgccgctgatctgggccactataggcctccttgtggcgtgctgtatctgggcatggattactggggcaagggcacacaagtgacagtctcgagcggcggaggatcccaagtgcagctgcaagagagcggaggaggcagcgtcgaagctggaggatctctgaggctgagctgtgctgccagcggctacactcacagcagctactgtatgggctggttcagacaagcccccggcaaggagagggaaggcgtggctgccatcgacgtggatggcagcactacttacgccgacagcgtgaagggaaggttcactatcagcaaggacaacgccaagaacacactctatctgcagatgaacagcctcaagccagaggacactggcatgtactactgcgccgccgagttcgccgattgcagcagcaactactttctgcctcccggcgccgtcagatattggggccaaggcactcaagtgacagtctcgtctgctagccaccatcaccatcaccac

SEQ ID NO: 330 - DNA, 786 bp, Artificial Sequence
  Description of Artificial Sequence: Synthetic polynucleotide
caagtgcagctgcaagagagcggaggaggaagcgtccaagccggaggctctctgaggctgagctgtggagccagcggctacacttacagcagctactgtatgggctggtttaggcaagtgcccggcaaggagagagagggcgtggccgtgatcgattccgatggcagcacaagctacgctgacagcgtgaagggaaggttcacaatcagcaaggacaacggcaagaacacactctatctgcagatgaacagcctcaagccagaggacacagccatgtactactgcgccgctgatctgggccactataggcctccttgtggcgtgctgtatctgggcatggattactggggcaagggcacacaagtgacagtctcgagcggcggaggatcccaagtgcagctgcaagagagcggaggaggaagcgtccaagccggaggatctctgagactgagctgcgccgctagtggctactcctacagcagctactgcatgggctggtttaggcaagcccccggcaaggagagagaaggcgtggccactatcgacagcgacggcatgacaaggtacgccgacagcgtgaagggaaggttcacaatcagcaaggacaacgccaagaacacactgtatctgcagatgaactctctgaagccagaggacactgccatgtactactgtgccgctcctctgtacgactgtgatagcggcgctgtgggcagaaatccaccttattggggccaaggcactcaagtgacagtctcgtctgctagccaccatcaccatcaccac

SEQ ID NO: 331 - DNA, 780 bp, Artificial Sequence
  Description of Artificial Sequence: Synthetic polynucleotide
caagtgcagctgcaagagagcggaggaggaagcgtccaagccggaggctctctgaggctgagctgtggagccagcggctacacttacagcagctactgtatgggctggtttaggcaagtgcccggcaaggagagagagggcgtggccgtgatcgattccgatggcagcacaagctacgctgacagcgtgaagggaaggttcacaatcagcaaggacaacggcaagaacacactctatctgcagatgaacagcctcaagccagaggacacagccatgtactactgcgccgctgatctgggccactataggcctccttgtggcgtgctgtatctgggcatggattactggggcaagggcacacaagtgacagtctcgagcggcggaggatcccaagtgcagctgcaagagagcggaggcggcagcgtgcagactggaggctctctgagactgagctgtgctgccagcggctacacttatctgaggggctgtatgggctggtttaggcaagcccccggcaaggagagagagggcgtggccgtcatggatgtggtgggcgataggagaagctacatcgacagcgtgaagggaaggttcacaatctctagggacaatgccgccaacagcgtctatctgcagatggacaatctgaagccagaggacacagccatgtactactgcactgccggccctaactgtgtgggctggagaagcggactggattactggggccaaggcacacaagtgacagtctcgtctgctagccaccatcaccatcaccac

SEQ ID NO: 332 - DNA, 795 bp, Artificial Sequence
  Description of Artificial Sequence: Synthetic polynucleotide
caagtgcagctgcaagagagcggaggaggaagcgtccaagccggaggctctctgagactgagctgtgccgccagcggctactccaactgcagctacgacatgacttggtataggcaagcccccggcaaggagagggagttcgtgtccgccatccacagcgacggcagcactagatacgccgacagcgtgaagggaaggttcttcatcagccaagataacgccaagaacacagtgtatctgcagatgaactccctcaagccagaggacactgccatgtactactgcaagacagacccactgcactgcagagcccatggcggcagctggtatagcgtgagggccaactactggggccaaggcacacaagtgacagtctcgagcggcggaggatcccaagtgcagctgcaagagagcggcggaggaagcgtgcaagctggaggctctctgaggctgagctgtgctgccagcggctacacttatagcagcggctgtatgggctggttcagacaagcccccggcaaggaaagggaagccgtggccgccatcaattccgatggcagcacaagctacgccgacagcgtgaagggaaggttcacaatcagcaaggacaacgccaagaacacactctatctgcagatgaactctctgaagccagaggacacagccatgtactactgcgccgctgagccttactgtagcggcggctacccaagatggagcgtcgctgagttcggctactggggccaaggcacacaagtgactgtctcgtctgctagccaccatcaccatcaccac

SEQ ID NO: 333 - DNA, 789 bp, Artificial Sequence
  Description of Artificial Sequence: Synthetic polynucleotide
caagtgcagctgcaagagagcggaggaggaagcgtccaagccggaggctctctgagactgagctgtgccgccagcggctactccaactgcagctacgacatgacttggtataggcaagcccccggcaaggagagggagttcgtgtccgccatccacagcgacggcagcactagatacgccgacagcgtgaagggaaggttcttcatcagccaagataacgccaagaacacagtgtatctgcagatgaactccctcaagccagaggacactgccatgtactactgcaagacagacccactgcactgcagagcccatggcggcagctggtatagcgtgagggccaactactggggccaaggcacacaagtgacagtctcgagcggcggaggatcccaagtgcagctgcaagagagcggaggaggcagcgtccaagccggaggctctctgaggctgagctgtgctgccagcggctacacttacagcagctactgcatgggctggttcagacaagcccccggcaaggagagagagggcgtggctcacatcgacagcgacggctccacaagctacgccgatagcgtgaagggaaggttcacaatctccaaggacaacgccaagaacactctgtacctccagatgaactctctgaagccagaggacactgccatgtactactgtgccgccgatccaattcccggccccggctactgcgatggcggccctaacaagtactggggccaaggcacacaagtgactgtctcgtctgctagccaccatcaccatcaccac

SEQ ID NO: 334 - DNA, 780 bp, Artificial Sequence
  Description of Artificial Sequence: Synthetic polynucleotide
caagtgcagctgcaagagagcggaggaggaagcgtccaagccggaggctctctgagactgagctgtgccgccagcggctactccaactgcagctacgacatgacttggtataggcaagcccccggcaaggagagggagttcgtgtccgccatccacagcgacggcagcactagatacgccgacagcgtgaagggaaggttcttcatcagccaagataacgccaagaacacagtgtatctgcagatgaactccctcaagccagaggacactgccatgtactactgcaagacagacccactgcactgcagagcccatggcggcagctggtatagcgtgagggccaactactggggccaaggcacacaagtgacagtctcgagcggcggaggatcccaagtgcagctgcaagagtccggaggaggaagcgtgcaagccggcggatctctgagactgagctgtgccgcctctaggtacacttacaacagctactgcatgggctggttcagacaagcccccggcaaggaaagagagggcgtggccactatcgatagcgacggcatgactaggtacgctgatagcgtcaagggaaggttcacaatctccaaggacaatgctaagaacactctgtacctccagatgaactctctgaagccagaggacacagccatgtactactgcgctgccgatgccgactgcactatcgccgccatgactactaatcctctgggccaaggcacacaagtgactgtctcgtctgctagccaccatcaccatcaccac

SEQ ID NO: 335 - DNA, 792 bp, Artificial Sequence
  Description of Artificial Sequence: Synthetic polynucleotide
caagtgcagctgcaagagagcggaggaggaagcgtccaagccggaggctctctgagactgagctgtgccgccagcggctactccaactgcagctacgacatgacttggtataggcaagcccccggcaaggagagggagttcgtgtccgccatccacagcgacggcagcactagatacgccgacagcgtgaagggaaggttcttcatcagccaagataacgccaagaacacagtgtatctgcagatgaactccctcaagccagaggacactgccatgtactactgcaagacagacccactgcactgcagagcccatggcggcagctggtatagcgtgagggccaactactggggccaaggcacacaagtgacagtctcgagcggcggaggatcccaagtgcagctgcaagagtccggcggaggcagcgtccaagccggaggatctctgaggctgagctgtacagtgagcagatacactgccagcgtgaactacatgggctggttcagacaagcccccggcaaagagagagagggcgtggccacaatcttcactggcgccggcacaacatactacgccaactccgtcaagggaaggttcacaatctctagggacaacgccaagaacactgcctatctgcagatgaactccctcaagccagaggacactgccatctactactgcgccgtggatttcagaggcggactgctgtataggccagcctacgagtacacttataggggccaaggcacacaagtgacagtctcgtctgctagccaccatcaccatcaccac

SEQ ID NO: 336 - DNA, 795 bp, Artificial Sequence
  Description of Artificial Sequence: Synthetic polynucleotide
caagtgcagctgcaagagagcggaggaggaagcgtccaagccggaggctctctgagactgagctgtgccgccagcggctactccaactgcagctacgacatgacttggtataggcaagcccccggcaaggagagggagttcgtgtccgccatccacagcgacggcagcactagatacgccgacagcgtgaagggaaggttcttcatcagccaagataacgccaagaacacagtgtatctgcagatgaactccctcaagccagaggacactgccatgtactactgcaagacagacccactgcactgcagagcccatggcggcagctggtatagcgtgagggccaactactggggccaaggcacacaagtgacagtctcgagcggcggaggatcccaagtgcagctgcaagagagcggaggaggcagcgtcgaagctggaggatctctgaggctgagctgtgctgccagcggctacactcacagcagctactgtatgggctggttcagacaagcccccggcaaggagagggaaggcgtggctgccatcgacgtggatggcagcactacttacgccgacagcgtgaagggaaggttcactatcagcaaggacaacgccaagaacacactctatctgcagatgaacagcctcaagccagaggacactggcatgtactactgcgccgccgagttcgccgattgcagcagcaactactttctgcctcccggcgccgtcagatattggggccaaggcactcaagtgacagtctcgtctgctagccaccatcaccatcaccac

SEQ ID NO: 337 - DNA, 789 bp, Artificial Sequence
  Description of Artificial Sequence: Synthetic polynucleotide
caagtgcagctgcaagagagcggaggaggaagcgtccaagccggaggctctctgagactgagctgtgccgccagcggctactccaactgcagctacgacatgacttggtataggcaagcccccggcaaggagagggagttcgtgtccgccatccacagcgacggcagcactagatacgccgacagcgtgaagggaaggttcttcatcagccaagataacgccaagaacacagtgtatctgcagatgaactccctcaagccagaggacactgccatgtactactgcaagacagacccactgcactgcagagcccatggcggcagctggtatagcgtgagggccaactactggggccaaggcacacaagtgacagtctcgagcggcggaggatcccaagtgcagctgcaagagagcggaggaggaagcgtccaagccggaggatctctgagactgagctgcgccgctagtggctactcctacagcagctactgcatgggctggtttaggcaagcccccggcaaggagagagaaggcgtggccactatcgacagcgacggcatgacaaggtacgccgacagcgtgaagggaaggttcacaatcagcaaggacaacgccaagaacacactgtatctgcagatgaactctctgaagccagaggacactgccatgtactactgtgccgctcctctgtacgactgtgatagcggcgctgtgggcagaaatccaccttattggggccaaggcactcaagtgacagtctcgtctgctagccaccatcaccatcaccac

SEQ ID NO: 338 - DNA, 783 bp, Artificial Sequence
  Description of Artificial Sequence: Synthetic polynucleotide
caagtgcagctgcaagagagcggaggaggaagcgtccaagccggaggctctctgagactgagctgtgccgccagcggctactccaactgcagctacgacatgacttggtataggcaagcccccggcaaggagagggagttcgtgtccgccatccacagcgacggcagcactagatacgccgacagcgtgaagggaaggttcttcatcagccaagataacgccaagaacacagtgtatctgcagatgaactccctcaagccagaggacactgccatgtactactgcaagacagacccactgcactgcagagcccatggcggcagctggtatagcgtgagggccaactactggggccaaggcacacaagtgacagtctcgagcggcggaggatcccaagtgcagctgcaagagagcggaggcggcagcgtgcagactggaggctctctgagactgagctgtgctgccagcggctacacttatctgaggggctgtatgggctggtttaggcaagcccccggcaaggagagagagggcgtggccgtcatggatgtggtgggcgataggagaagctacatcgacagcgtgaagggaaggttcacaatctctagggacaatgccgccaacagcgtctatctgcagatggacaatctgaagccagaggacacagccatgtactactgcactgccggccctaactgtgtgggctggagaagcggactggattactggggccaaggcacacaagtgacagtctcgtctgctagccaccatcaccatcaccac

SEQ ID NO: 339 - DNA, 789 bp, Artificial Sequence
  Description of Artificial Sequence: Synthetic polynucleotide
caagtgcagctgcaagagagcggcggaggaagcgtgcaagctggaggctctctgaggctgagctgtgctgccagcggctacacttatagcagcggctgtatgggctggttcagacaagcccccggcaaggaaagggaagccgtggccgccatcaattccgatggcagcacaagctacgccgacagcgtgaagggaaggttcacaatcagcaaggacaacgccaagaacacactctatctgcagatgaactctctgaagccagaggacacagccatgtactactgcgccgctgagccttactgtagcggcggctacccaagatggagcgtcgctgagttcggctactggggccaaggcacacaagtgactgtctcgagcggcggaggatcccaagtgcagctgcaagagagcggaggaggaagcgtgcaagccggaggctctctgagactgagctgtgccgcctctaggtatctgtacagcatcgactacatggcttggttcagacagagccccggcaaggagagggagccagtggctgtcatctacactgcctccggcgccacattctatccagatagcgtgaagggaaggttcactatcagccaagataacgccaagatgacagtgtatctgcagatgaactctctgaagagcgaggacactgccatgtactactgtgccgccgtgaggaagacagatagctacctcttcgacgcccagagcttcacatactggggccaaggcacacaagtgacagtctcgtctgctagccaccatcaccatcaccac

SEQ ID NO: 340 - DNA, 801 bp, Artificial Sequence
  Description of Artificial Sequence: Synthetic polynucleotide
caagtgcagctgcaagagagcggcggaggaagcgtgcaagctggaggctctctgaggctgagctgtgctgccagcggctacacttatagcagcggctgtatgggctggttcagacaagcccccggcaaggaaagggaagccgtggccgccatcaattccgatggcagcacaagctacgccgacagcgtgaagggaaggttcacaatcagcaaggacaacgccaagaacacactctatctgcagatgaactctctgaagccagaggacacagccatgtactactgcgccgctgagccttactgtagcggcggctacccaagatggagcgtcgctgagttcggctactggggccaaggcacacaagtgactgtctcgagcggcggaggatcccaagtgcagctgcaagagagcggaggaggaagcgtgcaagccggaggctctctgaggctgagctgtgccgcctctaggttcacatacagcagctactgcatgggctggttcagacaagcccccggcaaagagagagaaggcgtggccagcatcgatagcgatggctccactagctacactgacagcgtgaagggaaggttcactatcagcaaggacaacgccaagaacactctgtatctgcagatgaactctctgaagccagaggacacagccatgtactactgtgccctcgatctgatgagcacagtggtgcccggcttctgtggctttctgctgagcgctggcatggattactggggcaagggcactcaagtgactgtctcgtctgctagccaccatcaccatcaccac

SEQ ID NO: 341 - DNA, 807 bp, Artificial Sequence
  Description of Artificial Sequence: Synthetic polynucleotide
caagtgcagctgcaagagagcggcggaggaagcgtgcaagctggaggctctctgaggctgagctgtgctgccagcggctacacttatagcagcggctgtatgggctggttcagacaagcccccggcaaggaaagggaagccgtggccgccatcaattccgatggcagcacaagctacgccgacagcgtgaagggaaggttcacaatcagcaaggacaacgccaagaacacactctatctgcagatgaactctctgaagccagaggacacagccatgtactactgcgccgctgagccttactgtagcggcggctacccaagatggagcgtcgctgagttcggctactggggccaaggcacacaagtgactgtctcgagcggcggaggatcccaagtgcagctgcaagagtccggaggaggcagcgtccaagccggaggctctctgaggctgagctgtgctgccagcggctacacttacagcatgtactgcatgggctggttcagacaagcccccggcaaggaaagagagggcgtggcccagatcaatagcgatggcagcacaagctacgccgacagcgtgaagggaaggttcactatctccaaggacaacgccaagaacactctgtatctgcagatgaactctctgaagccagaggacactgccatgtactactgcgctgccgattctagggtgtacggcggcagctggtatgagaggctctgcggcccttacacatacgagtacaactactggggccaaggcacacaagtgactgtctcgtctgctagccaccatcaccatcaccac

SEQ ID NO: 342 - DNA, 816 bp, Artificial Sequence
  Description of Artificial Sequence: Synthetic polynucleotide
caagtgcagctgcaagagagcggcggaggaagcgtgcaagctggaggctctctgaggctgagctgtgctgccagcggctacacttatagcagcggctgtatgggctggttcagacaagcccccggcaaggaaagggaagccgtggccgccatcaattccgatggcagcacaagctacgccgacagcgtgaagggaaggttcacaatcagcaaggacaacgccaagaacacactctatctgcagatgaactctctgaagccagaggacacagccatgtactactgcgccgctgagccttactgtagcggcggctacccaagatggagcgtcgctgagttcggctactggggccaaggcacacaagtgactgtctcgagcggcggaggatcccaagtgcagctgcaagagagcggcggaggaagcgtgcaagccggaggatctctgagactgagctgcgctgtgagcggctacgcctactccacatactgcatgggctggtttaggcaagcccccggcaaagagagagagggcgtggctgctatcgatagcggcggcagcacaagctacgccgatagcgtgaagggaaggttcacaatcagcaaggacaacgccaagaacacactgtatctgaggatgaactctctgaagccagaggacacagccatgtactactgtgctgctgtgcctcctcctccagatggcggcagctgtctgtttctgggaccagagatcaaggtcagcaaggccgattttaggtactggggccaaggcacacaagtgacagtctcgtctgctagccaccatcaccatcaccac

SEQ ID NO: 343 - DNA, 795 bp, Artificial Sequence
  Description of Artificial Sequence: Synthetic polynucleotide
caagtgcagctgcaagagagcggcggaggaagcgtgcaagctggaggctctctgaggctgagctgtgctgccagcggctacacttatagcagcggctgtatgggctggttcagacaagcccccggcaaggaaagggaagccgtggccgccatcaattccgatggcagcacaagctacgccgacagcgtgaagggaaggttcacaatcagcaaggacaacgccaagaacacactctatctgcagatgaactctctgaagccagaggacacagccatgtactactgcgccgctgagccttactgtagcggcggctacccaagatggagcgtcgctgagttcggctactggggccaaggcacacaagtgactgtctcgagcggcggaggatcccaagtgcagctgcaagagagcggaggaggaagcgtgcaagccggaggctctctgaggctgagctgtacagtgtccggctacacttacagctccaattgcatgggctggtttaggcaagcccccggcaaggaaagagagggcgtggccactatctacactggcggcggcaacacatactacgccgatagcgtgaagggaaggttcactatcagccaagataacgccaagaacacagtgtatctgcagatgaacaatctgaagccagaggacactgccatgtactactgtgctgctgagccactgtctagggtgtacggcggcagctgcccaactcctacattcgactactggggccaaggcacacaagtgactgtctcgtctgctagccaccatcaccatcaccac

SEQ ID NO: 344 - DNA, 792 bp, Artificial Sequence
  Description of Artificial Sequence: Synthetic polynucleotide
caagtgcagctgcaagagagcggcggaggaagcgtgcaagctggaggctctctgaggctgagctgtgctgccagcggctacacttatagcagcggctgtatgggctggttcagacaagcccccggcaaggaaagggaagccgtggccgccatcaattccgatggcagcacaagctacgccgacagcgtgaagggaaggttcacaatcagcaaggacaacgccaagaacacactctatctgcagatgaactctctgaagccagaggacacagccatgtactactgcgccgctgagccttactgtagcggcggctacccaagatggagcgtcgctgagttcggctactggggccaaggcacacaagtgactgtctcgagcggcggaggatcccaagtgcagctgcaagagagcggaggaggaagcgtccaagccggaggctctctgaggctgagctgtggagccagcggctacacttacagcagctactgtatgggctggtttaggcaagtgcccggcaaggagagagagggcgtggccgtgatcgattccgatggcagcacaagctacgctgacagcgtgaagggaaggttcacaatcagcaaggacaacggcaagaacacactctatctgcagatgaacagcctcaagccagaggacacagccatgtactactgcgccgctgatctgggccactataggcctccttgtggcgtgctgtatctgggcatggattactggggcaagggcacacaagtgacagtctcgtctgctagccaccatcaccatcaccac

SEQ ID NO: 345 - DNA, 795 bp, Artificial Sequence
  Description of Artificial Sequence: Synthetic polynucleotide
caagtgcagctgcaagagagcggcggaggaagcgtgcaagctggaggctctctgaggctgagctgtgctgccagcggctacacttatagcagcggctgtatgggctggttcagacaagcccccggcaaggaaagggaagccgtggccgccatcaattccgatggcagcacaagctacgccgacagcgtgaagggaaggttcacaatcagcaaggacaacgccaagaacacactctatctgcagatgaactctctgaagccagaggacacagccatgtactactgcgccgctgagccttactgtagcggcggctacccaagatggagcgtcgctgagttcggctactggggccaaggcacacaagtgactgtctcgagcggcggaggatcccaagtgcagctgcaagagagcggaggaggaagcgtccaagccggaggctctctgagactgagctgtgccgccagcggctactccaactgcagctacgacatgacttggtataggcaagcccccggcaaggagagggagttcgtgtccgccatccacagcgacggcagcactagatacgccgacagcgtgaagggaaggttcttcatcagccaagataacgccaagaacacagtgtatctgcagatgaactccctcaagccagaggacactgccatgtactactgcaagacagacccactgcactgcagagcccatggcggcagctggtatagcgtgagggccaactactggggccaaggcacacaagtgacagtctcgtctgctagccaccatcaccatcaccac

SEQ ID NO: 346 - DNA, 783 bp, Artificial Sequence
  Description of Artificial Sequence: Synthetic polynucleotide
caagtgcagctgcaagagagcggaggaggcagcgtccaagccggaggctctctgaggctgagctgtgctgccagcggctacacttacagcagctactgcatgggctggttcagacaagcccccggcaaggagagagagggcgtggctcacatcgacagcgacggctccacaagctacgccgatagcgtgaagggaaggttcacaatctccaaggacaacgccaagaacactctgtacctccagatgaactctctgaagccagaggacactgccatgtactactgtgccgccgatccaattcccggccccggctactgcgatggcggccctaacaagtactggggccaaggcacacaagtgactgtctcgagcggcggaggatcccaagtgcagctgcaagagagcggaggaggaagcgtgcaagccggaggctctctgagactgagctgtgccgcctctaggtatctgtacagcatcgactacatggcttggttcagacagagccccggcaaggagagggagccagtggctgtcatctacactgcctccggcgccacattctatccagatagcgtgaagggaaggttcactatcagccaagataacgccaagatgacagtgtatctgcagatgaactctctgaagagcgaggacactgccatgtactactgtgccgccgtgaggaagacagatagctacctcttcgacgcccagagcttcacatactggggccaaggcacacaagtgacagtctcgtctgctagccaccatcaccatcaccac

SEQ ID NO: 347 - DNA, 795 bp, Artificial Sequence
  Description of Artificial Sequence: Synthetic polynucleotide
caagtgcagctgcaagagagcggaggaggcagcgtccaagccggaggctctctgaggctgagctgtgctgccagcggctacacttacagcagctactgcatgggctggttcagacaagcccccggcaaggagagagagggcgtggctcacatcgacagcgacggctccacaagctacgccgatagcgtgaagggaaggttcacaatctccaaggacaacgccaagaacactctgtacctccagatgaactctctgaagccagaggacactgccatgtactactgtgccgccgatccaattcccggccccggctactgcgatggcggccctaacaagtactggggccaaggcacacaagtgactgtctcgagcggcggaggatcccaagtgcagctgcaagagagcggaggaggaagcgtgcaagccggaggctctctgaggctgagctgtgccgcctctaggttcacatacagcagctactgcatgggctggttcagacaagcccccggcaaagagagagaaggcgtggccagcatcgatagcgatggctccactagctacactgacagcgtgaagggaaggttcactatcagcaaggacaacgccaagaacactctgtatctgcagatgaactctctgaagccagaggacacagccatgtactactgtgccctcgatctgatgagcacagtggtgcccggcttctgtggctttctgctgagcgctggcatggattactggggcaagggcactcaagtgactgtctcgtctgctagccaccatcaccatcaccac

SEQ ID NO: 348 - DNA, 801 bp, Artificial Sequence
  Description of Artificial Sequence: Synthetic polynucleotide
caagtgcagctgcaagagagcggaggaggcagcgtccaagccggaggctctctgaggctgagctgtgctgccagcggctacacttacagcagctactgcatgggctggttcagacaagcccccggcaaggagagagagggcgtggctcacatcgacagcgacggctccacaagctacgccgatagcgtgaagggaaggttcacaatctccaaggacaacgccaagaacactctgtacctccagatgaactctctgaagccagaggacactgccatgtactactgtgccgccgatccaattcccggccccggctactgcgatggcggccctaacaagtactggggccaaggcacacaagtgactgtctcgagcggcggaggatcccaagtgcagctgcaagagtccggaggaggcagcgtccaagccggaggctctctgaggctgagctgtgctgccagcggctacacttacagcatgtactgcatgggctggttcagacaagcccccggcaaggaaagagagggcgtggcccagatcaatagcgatggcagcacaagctacgccgacagcgtgaagggaaggttcactatctccaaggacaacgccaagaacactctgtatctgcagatgaactctctgaagccagaggacactgccatgtactactgcgctgccgattctagggtgtacggcggcagctggtatgagaggctctgcggcccttacacatacgagtacaactactggggccaaggcacacaagtgactgtctcgtctgctagccaccatcaccatcaccac

SEQ ID NO: 349 - DNA, 810 bp, Artificial Sequence
  Description of Artificial Sequence: Synthetic polynucleotide
caagtgcagctgcaagagagcggaggaggcagcgtccaagccggaggctctctgaggctgagctgtgctgccagcggctacacttacagcagctactgcatgggctggttcagacaagcccccggcaaggagagagagggcgtggctcacatcgacagcgacggctccacaagctacgccgatagcgtgaagggaaggttcacaatctccaaggacaacgccaagaacactctgtacctccagatgaactctctgaagccagaggacactgccatgtactactgtgccgccgatccaattcccggccccggctactgcgatggcggccctaacaagtactggggccaaggcacacaagtgactgtctcgagcggcggaggatcccaagtgcagctgcaagagagcggcggaggaagcgtgcaagccggaggatctctgagactgagctgcgctgtgagcggctacgcctactccacatactgcatgggctggtttaggcaagcccccggcaaagagagagagggcgtggctgctatcgatagcggcggcagcacaagctacgccgatagcgtgaagggaaggttcacaatcagcaaggacaacgccaagaacacactgtatctgaggatgaactctctgaagccagaggacacagccatgtactactgtgctgctgtgcctcctcctccagatggcggcagctgtctgtttctgggaccagagatcaaggtcagcaaggccgattttaggtactggggccaaggcacacaagtgacagtctcgtctgctagccaccatcaccatcaccac

SEQ ID NO: 350 - DNA, 789 bp, Artificial Sequence
  Description of Artificial Sequence: Synthetic polynucleotide
caagtgcagctgcaagagagcggaggaggcagcgtccaagccggaggctctctgaggctgagctgtgctgccagcggctacacttacagcagctactgcatgggctggttcagacaagcccccggcaaggagagagagggcgtggctcacatcgacagcgacggctccacaagctacgccgatagcgtgaagggaaggttcacaatctccaaggacaacgccaagaacactctgtacctccagatgaactctctgaagccagaggacactgccatgtactactgtgccgccgatccaattcccggccccggctactgcgatggcggccctaacaagtactggggccaaggcacacaagtgactgtctcgagcggcggaggatcccaagtgcagctgcaagagagcggaggaggaagcgtgcaagccggaggctctctgaggctgagctgtacagtgtccggctacacttacagctccaattgcatgggctggtttaggcaagcccccggcaaggaaagagagggcgtggccactatctacactggcggcggcaacacatactacgccgatagcgtgaagggaaggttcactatcagccaagataacgccaagaacacagtgtatctgcagatgaacaatctgaagccagaggacactgccatgtactactgtgctgctgagccactgtctagggtgtacggcggcagctgcccaactcctacattcgactactggggccaaggcacacaagtgactgtctcgtctgctagccaccatcaccatcaccac

SEQ ID NO: 351 - DNA, 786 bp, Artificial Sequence
  Description of Artificial Sequence: Synthetic polynucleotide
caagtgcagctgcaagagagcggaggaggcagcgtccaagccggaggctctctgaggctgagctgtgctgccagcggctacacttacagcagctactgcatgggctggttcagacaagcccccggcaaggagagagagggcgtggctcacatcgacagcgacggctccacaagctacgccgatagcgtgaagggaaggttcacaatctccaaggacaacgccaagaacactctgtacctccagatgaactctctgaagccagaggacactgccatgtactactgtgccgccgatccaattcccggccccggctactgcgatggcggccctaacaagtactggggccaaggcacacaagtgactgtctcgagcggcggaggatcccaagtgcagctgcaagagagcggaggaggaagcgtccaagccggaggctctctgaggctgagctgtggagccagcggctacacttacagcagctactgtatgggctggtttaggcaagtgcccggcaaggagagagagggcgtggccgtgatcgattccgatggcagcacaagctacgctgacagcgtgaagggaaggttcacaatcagcaaggacaacggcaagaacacactctatctgcagatgaacagcctcaagccagaggacacagccatgtactactgcgccgctgatctgggccactataggcctccttgtggcgtgctgtatctgggcatggattactggggcaagggcacacaagtgacagtctcgtctgctagccaccatcaccatcaccac

SEQ ID NO: 352 - DNA, 789 bp, Artificial Sequence
  Description of Artificial Sequence: Synthetic polynucleotide
caagtgcagctgcaagagagcggaggaggcagcgtccaagccggaggctctctgaggctgagctgtgctgccagcggctacacttacagcagctactgcatgggctggttcagacaagcccccggcaaggagagagagggcgtggctcacatcgacagcgacggctccacaagctacgccgatagcgtgaagggaaggttcacaatctccaaggacaacgccaagaacactctgtacctccagatgaactctctgaagccagaggacactgccatgtactactgtgccgccgatccaattcccggccccggctactgcgatggcggccctaacaagtactggggccaaggcacacaagtgactgtctcgagcggcggaggatcccaagtgcagctgcaagagagcggaggaggaagcgtccaagccggaggctctctgagactgagctgtgccgccagcggctactccaactgcagctacgacatgacttggtataggcaagcccccggcaaggagagggagttcgtgtccgccatccacagcgacggcagcactagatacgccgacagcgtgaagggaaggttcttcatcagccaagataacgccaagaacacagtgtatctgcagatgaactccctcaagccagaggacactgccatgtactactgcaagacagacccactgcactgcagagcccatggcggcagctggtatagcgtgagggccaactactggggccaaggcacacaagtgacagtctcgtctgctagccaccatcaccatcaccac

SEQ ID NO: 353 - DNA, 774 bp, Artificial Sequence
  Description of Artificial Sequence: Synthetic polynucleotide
caagtgcagctgcaagagtccggaggaggaagcgtgcaagccggcggatctctgagactgagctgtgccgcctctaggtacacttacaacagctactgcatgggctggttcagacaagcccccggcaaggaaagagagggcgtggccactatcgatagcgacggcatgactaggtacgctgatagcgtcaagggaaggttcacaatctccaaggacaatgctaagaacactctgtacctccagatgaactctctgaagccagaggacacagccatgtactactgcgctgccgatgccgactgcactatcgccgccatgactactaatcctctgggccaaggcacacaagtgactgtctcgagcggcggaggatcccaagtgcagctgcaagagagcggaggaggaagcgtgcaagccggaggctctctgagactgagctgtgccgcctctaggtatctgtacagcatcgactacatggcttggttcagacagagccccggcaaggagagggagccagtggctgtcatctacactgcctccggcgccacattctatccagatagcgtgaagggaaggttcactatcagccaagataacgccaagatgacagtgtatctgcagatgaactctctgaagagcgaggacactgccatgtactactgtgccgccgtgaggaagacagatagctacctcttcgacgcccagagcttcacatactggggccaaggcacacaagtgacagtctcgtctgctagccaccatcaccatcaccac

SEQ ID NO: 354 - DNA, 786 bp, Artificial Sequence
  Description of Artificial Sequence: Synthetic polynucleotide
caagtgcagctgcaagagtccggaggaggaagcgtgcaagccggcggatctctgagactgagctgtgccgcctctaggtacacttacaacagctactgcatgggctggttcagacaagcccccggcaaggaaagagagggcgtggccactatcgatagcgacggcatgactaggtacgctgatagcgtcaagggaaggttcacaatctccaaggacaatgctaagaacactctgtacctccagatgaactctctgaagccagaggacacagccatgtactactgcgctgccgatgccgactgcactatcgccgccatgactactaatcctctgggccaaggcacacaagtgactgtctcgagcggcggaggatcccaagtgcagctgcaagagagcggaggaggaagcgtgcaagccggaggctctctgaggctgagctgtgccgcctctaggttcacatacagcagctactgcatgggctggttcagacaagcccccggcaaagagagagaaggcgtggccagcatcgatagcgatggctccactagctacactgacagcgtgaagggaaggttcactatcagcaaggacaacgccaagaacactctgtatctgcagatgaactctctgaagccagaggacacagccatgtactactgtgccctcgatctgatgagcacagtggtgcccggcttctgtggctttctgctgagcgctggcatggattactggggcaagggcactcaagtgactgtctcgtctgctagccaccatcaccatcaccac

SEQ ID NO: 355 - DNA, 792 bp, Artificial Sequence
  Description of Artificial Sequence: Synthetic polynucleotide
caagtgcagctgcaagagtccggaggaggaagcgtgcaagccggcggatctctgagactgagctgtgccgcctctaggtacacttacaacagctactgcatgggctggttcagacaagcccccggcaaggaaagagagggcgtggccactatcgatagcgacggcatgactaggtacgctgatagcgtcaagggaaggttcacaatctccaaggacaatgctaagaacactctgtacctccagatgaactctctgaagccagaggacacagccatgtactactgcgctgccgatgccgactgcactatcgccgccatgactactaatcctctgggccaaggcacacaagtgactgtctcgagcggcggaggatcccaagtgcagctgcaagagtccggaggaggcagcgtccaagccggaggctctctgaggctgagctgtgctgccagcggctacacttacagcatgtactgcatgggctggttcagacaagcccccggcaaggaaagagagggcgtggcccagatcaatagcgatggcagcacaagctacgccgacagcgtgaagggaaggttcactatctccaaggacaacgccaagaacactctgtatctgcagatgaactctctgaagccagaggacactgccatgtactactgcgctgccgattctagggtgtacggcggcagctggtatgagaggctctgcggcccttacacatacgagtacaactactggggccaaggcacacaagtgactgtctcgtctgctagccaccatcaccatcaccac

SEQ ID NO: 356 - DNA, 801 bp, Artificial Sequence
  Description of Artificial Sequence: Synthetic polynucleotide
caagtgcagctgcaagagtccggaggaggaagcgtgcaagccggcggatctctgagactgagctgtgccgcctctaggtacacttacaacagctactgcatgggctggttcagacaagcccccggcaaggaaagagagggcgtggccactatcgatagcgacggcatgactaggtacgctgatagcgtcaagggaaggttcacaatctccaaggacaatgctaagaacactctgtacctccagatgaactctctgaagccagaggacacagccatgtactactgcgctgccgatgccgactgcactatcgccgccatgactactaatcctctgggccaaggcacacaagtgactgtctcgagcggcggaggatcccaagtgcagctgcaagagagcggcggaggaagcgtgcaagccggaggatctctgagactgagctgcgctgtgagcggctacgcctactccacatactgcatgggctggtttaggcaagcccccggcaaagagagagagggcgtggctgctatcgatagcggcggcagcacaagctacgccgatagcgtgaagggaaggttcacaatcagcaaggacaacgccaagaacacactgtatctgaggatgaactctctgaagccagaggacacagccatgtactactgtgctgctgtgcctcctcctccagatggcggcagctgtctgtttctgggaccagagatcaaggtcagcaaggccgattttaggtactggggccaaggcacacaagtgacagtctcgtctgctagccaccatcaccatcaccac

SEQ ID NO: 357 - DNA, 780 bp, Artificial Sequence
  Description of Artificial Sequence: Synthetic polynucleotide
caagtgcagctgcaagagtccggaggaggaagcgtgcaagccggcggatctctgagactgagctgtgccgcctctaggtacacttacaacagctactgcatgggctggttcagacaagcccccggcaaggaaagagagggcgtggccactatcgatagcgacggcatgactaggtacgctgatagcgtcaagggaaggttcacaatctccaaggacaatgctaagaacactctgtacctccagatgaactctctgaagccagaggacacagccatgtactactgcgctgccgatgccgactgcactatcgccgccatgactactaatcctctgggccaaggcacacaagtgactgtctcgagcggcggaggatcccaagtgcagctgcaagagagcggaggaggaagcgtgcaagccggaggctctctgaggctgagctgtacagtgtccggctacacttacagctccaattgcatgggctggtttaggcaagcccccggcaaggaaagagagggcgtggccactatctacactggcggcggcaacacatactacgccgatagcgtgaagggaaggttcactatcagccaagataacgccaagaacacagtgtatctgcagatgaacaatctgaagccagaggacactgccatgtactactgtgctgctgagccactgtctagggtgtacggcggcagctgcccaactcctacattcgactactggggccaaggcacacaagtgactgtctcgtctgctagccaccatcaccatcaccac

SEQ ID NO: 358 - DNA, 777 bp, Artificial Sequence
  Description of Artificial Sequence: Synthetic polynucleotide
caagtgcagctgcaagagtccggaggaggaagcgtgcaagccggcggatctctgagactgagctgtgccgcctctaggtacacttacaacagctactgcatgggctggttcagacaagcccccggcaaggaaagagagggcgtggccactatcgatagcgacggcatgactaggtacgctgatagcgtcaagggaaggttcacaatctccaaggacaatgctaagaacactctgtacctccagatgaactctctgaagccagaggacacagccatgtactactgcgctgccgatgccgactgcactatcgccgccatgactactaatcctctgggccaaggcacacaagtgactgtctcgagcggcggaggatcccaagtgcagctgcaagagagcggaggaggaagcgtccaagccggaggctctctgaggctgagctgtggagccagcggctacacttacagcagctactgtatgggctggtttaggcaagtgcccggcaaggagagagagggcgtggccgtgatcgattccgatggcagcacaagctacgctgacagcgtgaagggaaggttcacaatcagcaaggacaacggcaagaacacactctatctgcagatgaacagcctcaagccagaggacacagccatgtactactgcgccgctgatctgggccactataggcctccttgtggcgtgctgtatctgggcatggattactggggcaagggcacacaagtgacagtctcgtctgctagccaccatcaccatcaccac

SEQ ID NO: 359 - DNA, 780 bp, Artificial Sequence
  Description of Artificial Sequence: Synthetic polynucleotide
caagtgcagctgcaagagtccggaggaggaagcgtgcaagccggcggatctctgagactgagctgtgccgcctctaggtacacttacaacagctactgcatgggctggttcagacaagcccccggcaaggaaagagagggcgtggccactatcgatagcgacggcatgactaggtacgctgatagcgtcaagggaaggttcacaatctccaaggacaatgctaagaacactctgtacctccagatgaactctctgaagccagaggacacagccatgtactactgcgctgccgatgccgactgcactatcgccgccatgactactaatcctctgggccaaggcacacaagtgactgtctcgagcggcggaggatcccaagtgcagctgcaagagagcggaggaggaagcgtccaagccggaggctctctgagactgagctgtgccgccagcggctactccaactgcagctacgacatgacttggtataggcaagcccccggcaaggagagggagttcgtgtccgccatccacagcgacggcagcactagatacgccgacagcgtgaagggaaggttcttcatcagccaagataacgccaagaacacagtgtatctgcagatgaactccctcaagccagaggacactgccatgtactactgcaagacagacccactgcactgcagagcccatggcggcagctggtatagcgtgagggccaactactggggccaaggcacacaagtgacagtctcgtctgctagccaccatcaccatcaccac

SEQ ID NO: 360 - DNA, 786 bp, Artificial Sequence
  Description of Artificial Sequence: Synthetic polynucleotide
caagtgcagctgcaagagtccggcggaggcagcgtccaagccggaggatctctgaggctgagctgtacagtgagcagatacactgccagcgtgaactacatgggctggttcagacaagcccccggcaaagagagagagggcgtggccacaatcttcactggcgccggcacaacatactacgccaactccgtcaagggaaggttcacaatctctagggacaacgccaagaacactgcctatctgcagatgaactccctcaagccagaggacactgccatctactactgcgccgtggatttcagaggcggactgctgtataggccagcctacgagtacacttataggggccaaggcacacaagtgacagtctcgagcggcggaggatcccaagtgcagctgcaagagagcggaggaggaagcgtgcaagccggaggctctctgagactgagctgtgccgcctctaggtatctgtacagcatcgactacatggcttggttcagacagagccccggcaaggagagggagccagtggctgtcatctacactgcctccggcgccacattctatccagatagcgtgaagggaaggttcactatcagccaagataacgccaagatgacagtgtatctgcagatgaactctctgaagagcgaggacactgccatgtactactgtgccgccgtgaggaagacagatagctacctcttcgacgcccagagcttcacatactggggccaaggcacacaagtgacagtctcgtctgctagccaccatcaccatcaccac

SEQ ID NO: 361 - DNA, 798 bp, Artificial Sequence
  Description of Artificial Sequence: Synthetic polynucleotide
caagtgcagctgcaagagtccggcggaggcagcgtccaagccggaggatctctgaggctgagctgtacagtgagcagatacactgccagcgtgaactacatgggctggttcagacaagcccccggcaaagagagagagggcgtggccacaatcttcactggcgccggcacaacatactacgccaactccgtcaagggaaggttcacaatctctagggacaacgccaagaacactgcctatctgcagatgaactccctcaagccagaggacactgccatctactactgcgccgtggatttcagaggcggactgctgtataggccagcctacgagtacacttataggggccaaggcacacaagtgacagtctcgagcggcggaggatcccaagtgcagctgcaagagagcggaggaggaagcgtgcaagccggaggctctctgaggctgagctgtgccgcctctaggttcacatacagcagctactgcatgggctggttcagacaagcccccggcaaagagagagaaggcgtggccagcatcgatagcgatggctccactagctacactgacagcgtgaagggaaggttcactatcagcaaggacaacgccaagaacactctgtatctgcagatgaactctctgaagccagaggacacagccatgtactactgtgccctcgatctgatgagcacagtggtgcccggcttctgtggctttctgctgagcgctggcatggattactggggcaagggcactcaagtgactgtctcgtctgctagccaccatcaccatcaccac

SEQ ID NO: 362 - DNA, 804 bp, Artificial Sequence
  Description of Artificial Sequence: Synthetic polynucleotide
caagtgcagctgcaagagtccggcggaggcagcgtccaagccggaggatctctgaggctgagctgtacagtgagcagatacactgccagcgtgaactacatgggctggttcagacaagcccccggcaaagagagagagggcgtggccacaatcttcactggcgccggcacaacatactacgccaactccgtcaagggaaggttcacaatctctagggacaacgccaagaacactgcctatctgcagatgaactccctcaagccagaggacactgccatctactactgcgccgtggatttcagaggcggactgctgtataggccagcctacgagtacacttataggggccaaggcacacaagtgacagtctcgagcggcggaggatcccaagtgcagctgcaagagtccggaggaggcagcgtccaagccggaggctctctgaggctgagctgtgctgccagcggctacacttacagcatgtactgcatgggctggttcagacaagcccccggcaaggaaagagagggcgtggcccagatcaatagcgatggcagcacaagctacgccgacagcgtgaagggaaggttcactatctccaaggacaacgccaagaacactctgtatctgcagatgaactctctgaagccagaggacactgccatgtactactgcgctgccgattctagggtgtacggcggcagctggtatgagaggctctgcggcccttacacatacgagtacaactactggggccaaggcacacaagtgactgtctcgtctgctagccaccatcaccatcaccac

SEQ ID NO: 363 - DNA, 813 bp, Artificial Sequence
  Description of Artificial Sequence: Synthetic polynucleotide
caagtgcagctgcaagagtccggcggaggcagcgtccaagccggaggatctctgaggctgagctgtacagtgagcagatacactgccagcgtgaactacatgggctggttcagacaagcccccggcaaagagagagagggcgtggccacaatcttcactggcgccggcacaacatactacgccaactccgtcaagggaaggttcacaatctctagggacaacgccaagaacactgcctatctgcagatgaactccctcaagccagaggacactgccatctactactgcgccgtggatttcagaggcggactgctgtataggccagcctacgagtacacttataggggccaaggcacacaagtgacagtctcgagcggcggaggatcccaagtgcagctgcaagagagcggcggaggaagcgtgcaagccggaggatctctgagactgagctgcgctgtgagcggctacgcctactccacatactgcatgggctggtttaggcaagcccccggcaaagagagagagggcgtggctgctatcgatagcggcggcagcacaagctacgccgatagcgtgaagggaaggttcacaatcagcaaggacaacgccaagaacacactgtatctgaggatgaactctctgaagccagaggacacagccatgtactactgtgctgctgtgcctcctcctccagatggcggcagctgtctgtttctgggaccagagatcaaggtcagcaaggccgattttaggtactggggccaaggcacacaagtgacagtctcgtctgctagccaccatcaccatcaccac

SEQ ID NO: 364 - DNA, 792 bp, Artificial Sequence
  Description of Artificial Sequence: Synthetic polynucleotide
caagtgcagctgcaagagtccggcggaggcagcgtccaagccggaggatctctgaggctgagctgtacagtgagcagatacactgccagcgtgaactacatgggctggttcagacaagcccccggcaaagagagagagggcgtggccacaatcttcactggcgccggcacaacatactacgccaactccgtcaagggaaggttcacaatctctagggacaacgccaagaacactgcctatctgcagatgaactccctcaagccagaggacactgccatctactactgcgccgtggatttcagaggcggactgctgtataggccagcctacgagtacacttataggggccaaggcacacaagtgacagtctcgagcggcggaggatcccaagtgcagctgcaagagagcggaggaggaagcgtgcaagccggaggctctctgaggctgagctgtacagtgtccggctacacttacagctccaattgcatgggctggtttaggcaagcccccggcaaggaaagagagggcgtggccactatctacactggcggcggcaacacatactacgccgatagcgtgaagggaaggttcactatcagccaagataacgccaagaacacagtgtatctgcagatgaacaatctgaagccagaggacactgccatgtactactgtgctgctgagccactgtctagggtgtacggcggcagctgcccaactcctacattcgactactggggccaaggcacacaagtgactgtctcgtctgctagccaccatcaccatcaccac

SEQ ID NO: 365 - DNA, 789 bp, Artificial Sequence
  Description of Artificial Sequence: Synthetic polynucleotide
caagtgcagctgcaagagtccggcggaggcagcgtccaagccggaggatctctgaggctgagctgtacagtgagcagatacactgccagcgtgaactacatgggctggttcagacaagcccccggcaaagagagagagggcgtggccacaatcttcactggcgccggcacaacatactacgccaactccgtcaagggaaggttcacaatctctagggacaacgccaagaacactgcctatctgcagatgaactccctcaagccagaggacactgccatctactactgcgccgtggatttcagaggcggactgctgtataggccagcctacgagtacacttataggggccaaggcacacaagtgacagtctcgagcggcggaggatcccaagtgcagctgcaagagagcggaggaggaagcgtccaagccggaggctctctgaggctgagctgtggagccagcggctacacttacagcagctactgtatgggctggtttaggcaagtgcccggcaaggagagagagggcgtggccgtgatcgattccgatggcagcacaagctacgctgacagcgtgaagggaaggttcacaatcagcaaggacaacggcaagaacacactctatctgcagatgaacagcctcaagccagaggacacagccatgtactactgcgccgctgatctgggccactataggcctccttgtggcgtgctgtatctgggcatggattactggggcaagggcacacaagtgacagtctcgtctgctagccaccatcaccatcaccac

SEQ ID NO: 366 - DNA, 792 bp, Artificial Sequence
  Description of Artificial Sequence: Synthetic polynucleotide
caagtgcagctgcaagagtccggcggaggcagcgtccaagccggaggatctctgaggctgagctgtacagtgagcagatacactgccagcgtgaactacatgggctggttcagacaagcccccggcaaagagagagagggcgtggccacaatcttcactggcgccggcacaacatactacgccaactccgtcaagggaaggttcacaatctctagggacaacgccaagaacactgcctatctgcagatgaactccctcaagccagaggacactgccatctactactgcgccgtggatttcagaggcggactgctgtataggccagcctacgagtacacttataggggccaaggcacacaagtgacagtctcgagcggcggaggatcccaagtgcagctgcaagagagcggaggaggaagcgtccaagccggaggctctctgagactgagctgtgccgccagcggctactccaactgcagctacgacatgacttggtataggcaagcccccggcaaggagagggagttcgtgtccgccatccacagcgacggcagcactagatacgccgacagcgtgaagggaaggttcttcatcagccaagataacgccaagaacacagtgtatctgcagatgaactccctcaagccagaggacactgccatgtactactgcaagacagacccactgcactgcagagcccatggcggcagctggtatagcgtgagggccaactactggggccaaggcacacaagtgacagtctcgtctgctagccaccatcaccatcaccac

SEQ ID NO: 367 - DNA, 789 bp, Artificial Sequence
  Description of Artificial Sequence: Synthetic polynucleotide
caagtgcagctgcaagagagcggaggaggcagcgtcgaagctggaggatctctgaggctgagctgtgctgccagcggctacactcacagcagctactgtatgggctggttcagacaagcccccggcaaggagagggaaggcgtggctgccatcgacgtggatggcagcactacttacgccgacagcgtgaagggaaggttcactatcagcaaggacaacgccaagaacacactctatctgcagatgaacagcctcaagccagaggacactggcatgtactactgcgccgccgagttcgccgattgcagcagcaactactttctgcctcccggcgccgtcagatattggggccaaggcactcaagtgacagtctcgagcggcggaggatcccaagtgcagctgcaagagagcggaggaggaagcgtgcaagccggaggctctctgagactgagctgtgccgcctctaggtatctgtacagcatcgactacatggcttggttcagacagagccccggcaaggagagggagccagtggctgtcatctacactgcctccggcgccacattctatccagatagcgtgaagggaaggttcactatcagccaagataacgccaagatgacagtgtatctgcagatgaactctctgaagagcgaggacactgccatgtactactgtgccgccgtgaggaagacagatagctacctcttcgacgcccagagcttcacatactggggccaaggcacacaagtgacagtctcgtctgctagccaccatcaccatcaccac

SEQ ID NO: 368 - DNA, 801 bp, Artificial Sequence
  Description of Artificial Sequence: Synthetic polynucleotide
caagtgcagctgcaagagagcggaggaggcagcgtcgaagctggaggatctctgaggctgagctgtgctgccagcggctacactcacagcagctactgtatgggctggttcagacaagcccccggcaaggagagggaaggcgtggctgccatcgacgtggatggcagcactacttacgccgacagcgtgaagggaaggttcactatcagcaaggacaacgccaagaacacactctatctgcagatgaacagcctcaagccagaggacactggcatgtactactgcgccgccgagttcgccgattgcagcagcaactactttctgcctcccggcgccgtcagatattggggccaaggcactcaagtgacagtctcgagcggcggaggatcccaagtgcagctgcaagagagcggaggaggaagcgtgcaagccggaggctctctgaggctgagctgtgccgcctctaggttcacatacagcagctactgcatgggctggttcagacaagcccccggcaaagagagagaaggcgtggccagcatcgatagcgatggctccactagctacactgacagcgtgaagggaaggttcactatcagcaaggacaacgccaagaacactctgtatctgcagatgaactctctgaagccagaggacacagccatgtactactgtgccctcgatctgatgagcacagtggtgcccggcttctgtggctttctgctgagcgctggcatggattactggggcaagggcactcaagtgactgtctcgtctgctagccaccatcaccatcaccac

SEQ ID NO: 369 - DNA, 807 bp, Artificial Sequence
  Description of Artificial Sequence: Synthetic polynucleotide
caagtgcagctgcaagagagcggaggaggcagcgtcgaagctggaggatctctgaggctgagctgtgctgccagcggctacactcacagcagctactgtatgggctggttcagacaagcccccggcaaggagagggaaggcgtggctgccatcgacgtggatggcagcactacttacgccgacagcgtgaagggaaggttcactatcagcaaggacaacgccaagaacacactctatctgcagatgaacagcctcaagccagaggacactggcatgtactactgcgccgccgagttcgccgattgcagcagcaactactttctgcctcccggcgccgtcagatattggggccaaggcactcaagtgacagtctcgagcggcggaggatcccaagtgcagctgcaagagtccggaggaggcagcgtccaagccggaggctctctgaggctgagctgtgctgccagcggctacacttacagcatgtactgcatgggctggttcagacaagcccccggcaaggaaagagagggcgtggcccagatcaatagcgatggcagcacaagctacgccgacagcgtgaagggaaggttcactatctccaaggacaacgccaagaacactctgtatctgcagatgaactctctgaagccagaggacactgccatgtactactgcgctgccgattctagggtgtacggcggcagctggtatgagaggctctgcggcccttacacatacgagtacaactactggggccaaggcacacaagtgactgtctcgtctgctagccaccatcaccatcaccac

SEQ ID NO: 370 - DNA, 816 bp, Artificial Sequence
  Description of Artificial Sequence: Synthetic polynucleotide
caagtgcagctgcaagagagcggaggaggcagcgtcgaagctggaggatctctgaggctgagctgtgctgccagcggctacactcacagcagctactgtatgggctggttcagacaagcccccggcaaggagagggaaggcgtggctgccatcgacgtggatggcagcactacttacgccgacagcgtgaagggaaggttcactatcagcaaggacaacgccaagaacacactctatctgcagatgaacagcctcaagccagaggacactggcatgtactactgcgccgccgagttcgccgattgcagcagcaactactttctgcctcccggcgccgtcagatattggggccaaggcactcaagtgacagtctcgagcggcggaggatcccaagtgcagctgcaagagagcggcggaggaagcgtgcaagccggaggatctctgagactgagctgcgctgtgagcggctacgcctactccacatactgcatgggctggtttaggcaagcccccggcaaagagagagagggcgtggctgctatcgatagcggcggcagcacaagctacgccgatagcgtgaagggaaggttcacaatcagcaaggacaacgccaagaacacactgtatctgaggatgaactctctgaagccagaggacacagccatgtactactgtgctgctgtgcctcctcctccagatggcggcagctgtctgtttctgggaccagagatcaaggtcagcaaggccgattttaggtactggggccaaggcacacaagtgacagtctcgtctgctagccaccatcaccatcaccac

SEQ ID NO: 371 - DNA, 795 bp, Artificial Sequence
  Description of Artificial Sequence: Synthetic polynucleotide
caagtgcagctgcaagagagcggaggaggcagcgtcgaagctggaggatctctgaggctgagctgtgctgccagcggctacactcacagcagctactgtatgggctggttcagacaagcccccggcaaggagagggaaggcgtggctgccatcgacgtggatggcagcactacttacgccgacagcgtgaagggaaggttcactatcagcaaggacaacgccaagaacacactctatctgcagatgaacagcctcaagccagaggacactggcatgtactactgcgccgccgagttcgccgattgcagcagcaactactttctgcctcccggcgccgtcagatattggggccaaggcactcaagtgacagtctcgagcggcggaggatcccaagtgcagctgcaagagagcggaggaggaagcgtgcaagccggaggctctctgaggctgagctgtacagtgtccggctacacttacagctccaattgcatgggctggtttaggcaagcccccggcaaggaaagagagggcgtggccactatctacactggcggcggcaacacatactacgccgatagcgtgaagggaaggttcactatcagccaagataacgccaagaacacagtgtatctgcagatgaacaatctgaagccagaggacactgccatgtactactgtgctgctgagccactgtctagggtgtacggcggcagctgcccaactcctacattcgactactggggccaaggcacacaagtgactgtctcgtctgctagccaccatcaccatcaccac

SEQ ID NO: 372 - DNA, 792 bp, Artificial Sequence
  Description of Artificial Sequence: Synthetic polynucleotide
caagtgcagctgcaagagagcggaggaggcagcgtcgaagctggaggatctctgaggctgagctgtgctgccagcggctacactcacagcagctactgtatgggctggttcagacaagcccccggcaaggagagggaaggcgtggctgccatcgacgtggatggcagcactacttacgccgacagcgtgaagggaaggttcactatcagcaaggacaacgccaagaacacactctatctgcagatgaacagcctcaagccagaggacactggcatgtactactgcgccgccgagttcgccgattgcagcagcaactactttctgcctcccggcgccgtcagatattggggccaaggcactcaagtgacagtctcgagcggcggaggatcccaagtgcagctgcaagagagcggaggaggaagcgtccaagccggaggctctctgaggctgagctgtggagccagcggctacacttacagcagctactgtatgggctggtttaggcaagtgcccggcaaggagagagagggcgtggccgtgatcgattccgatggcagcacaagctacgctgacagcgtgaagggaaggttcacaatcagcaaggacaacggcaagaacacactctatctgcagatgaacagcctcaagccagaggacacagccatgtactactgcgccgctgatctgggccactataggcctccttgtggcgtgctgtatctgggcatggattactggggcaagggcacacaagtgacagtctcgtctgctagccaccatcaccatcaccac

SEQ ID NO: 373 - DNA, 795 bp, Artificial Sequence
  Description of Artificial Sequence: Synthetic polynucleotide
caagtgcagctgcaagagagcggaggaggcagcgtcgaagctggaggatctctgaggctgagctgtgctgccagcggctacactcacagcagctactgtatgggctggttcagacaagcccccggcaaggagagggaaggcgtggctgccatcgacgtggatggcagcactacttacgccgacagcgtgaagggaaggttcactatcagcaaggacaacgccaagaacacactctatctgcagatgaacagcctcaagccagaggacactggcatgtactactgcgccgccgagttcgccgattgcagcagcaactactttctgcctcccggcgccgtcagatattggggccaaggcactcaagtgacagtctcgagcggcggaggatcccaagtgcagctgcaagagagcggaggaggaagcgtccaagccggaggctctctgagactgagctgtgccgccagcggctactccaactgcagctacgacatgacttggtataggcaagcccccggcaaggagagggagttcgtgtccgccatccacagcgacggcagcactagatacgccgacagcgtgaagggaaggttcttcatcagccaagataacgccaagaacacagtgtatctgcagatgaactccctcaagccagaggacactgccatgtactactgcaagacagacccactgcactgcagagcccatggcggcagctggtatagcgtgagggccaactactggggccaaggcacacaagtgacagtctcgtctgctagccaccatcaccatcaccac

SEQ ID NO: 374 - DNA, 783 bp, Artificial Sequence
  Description of Artificial Sequence: Synthetic polynucleotide
caagtgcagctgcaagagagcggaggaggaagcgtccaagccggaggatctctgagactgagctgcgccgctagtggctactcctacagcagctactgcatgggctggtttaggcaagcccccggcaaggagagagaaggcgtggccactatcgacagcgacggcatgacaaggtacgccgacagcgtgaagggaaggttcacaatcagcaaggacaacgccaagaacacactgtatctgcagatgaactctctgaagccagaggacactgccatgtactactgtgccgctcctctgtacgactgtgatagcggcgctgtgggcagaaatccaccttattggggccaaggcactcaagtgacagtctcgagcggcggaggatcccaagtgcagctgcaagagagcggaggaggaagcgtgcaagccggaggctctctgagactgagctgtgccgcctctaggtatctgtacagcatcgactacatggcttggttcagacagagccccggcaaggagagggagccagtggctgtcatctacactgcctccggcgccacattctatccagatagcgtgaagggaaggttcactatcagccaagataacgccaagatgacagtgtatctgcagatgaactctctgaagagcgaggacactgccatgtactactgtgccgccgtgaggaagacagatagctacctcttcgacgcccagagcttcacatactggggccaaggcacacaagtgacagtctcgtctgctagccaccatcaccatcaccac

SEQ ID NO: 375 - DNA, 795 bp, Artificial Sequence
  Description of Artificial Sequence: Synthetic polynucleotide
caagtgcagctgcaagagagcggaggaggaagcgtccaagccggaggatctctgagactgagctgcgccgctagtggctactcctacagcagctactgcatgggctggtttaggcaagcccccggcaaggagagagaaggcgtggccactatcgacagcgacggcatgacaaggtacgccgacagcgtgaagggaaggttcacaatcagcaaggacaacgccaagaacacactgtatctgcagatgaactctctgaagccagaggacactgccatgtactactgtgccgctcctctgtacgactgtgatagcggcgctgtgggcagaaatccaccttattggggccaaggcactcaagtgacagtctcgagcggcggaggatcccaagtgcagctgcaagagagcggaggaggaagcgtgcaagccggaggctctctgaggctgagctgtgccgcctctaggttcacatacagcagctactgcatgggctggttcagacaagcccccggcaaagagagagaaggcgtggccagcatcgatagcgatggctccactagctacactgacagcgtgaagggaaggttcactatcagcaaggacaacgccaagaacactctgtatctgcagatgaactctctgaagccagaggacacagccatgtactactgtgccctcgatctgatgagcacagtggtgcccggcttctgtggctttctgctgagcgctggcatggattactggggcaagggcactcaagtgactgtctcgtctgctagccaccatcaccatcaccac

SEQ ID NO: 376 - DNA, 801 bp, Artificial Sequence
  Description of Artificial Sequence: Synthetic polynucleotide
caagtgcagctgcaagagagcggaggaggaagcgtccaagccggaggatctctgagactgagctgcgccgctagtggctactcctacagcagctactgcatgggctggtttaggcaagcccccggcaaggagagagaaggcgtggccactatcgacagcgacggcatgacaaggtacgccgacagcgtgaagggaaggttcacaatcagcaaggacaacgccaagaacacactgtatctgcagatgaactctctgaagccagaggacactgccatgtactactgtgccgctcctctgtacgactgtgatagcggcgctgtgggcagaaatccaccttattggggccaaggcactcaagtgacagtctcgagcggcggaggatcccaagtgcagctgcaagagtccggaggaggcagcgtccaagccggaggctctctgaggctgagctgtgctgccagcggctacacttacagcatgtactgcatgggctggttcagacaagcccccggcaaggaaagagagggcgtggcccagatcaatagcgatggcagcacaagctacgccgacagcgtgaagggaaggttcactatctccaaggacaacgccaagaacactctgtatctgcagatgaactctctgaagccagaggacactgccatgtactactgcgctgccgattctagggtgtacggcggcagctggtatgagaggctctgcggcccttacacatacgagtacaactactggggccaaggcacacaagtgactgtctcgtctgctagccaccatcaccatcaccac

SEQ ID NO: 377 - DNA, 810 bp, Artificial Sequence
  Description of Artificial Sequence: Synthetic polynucleotide
caagtgcagctgcaagagagcggaggaggaagcgtccaagccggaggatctctgagactgagctgcgccgctagtggctactcctacagcagctactgcatgggctggtttaggcaagcccccggcaaggagagagaaggcgtggccactatcgacagcgacggcatgacaaggtacgccgacagcgtgaagggaaggttcacaatcagcaaggacaacgccaagaacacactgtatctgcagatgaactctctgaagccagaggacactgccatgtactactgtgccgctcctctgtacgactgtgatagcggcgctgtgggcagaaatccaccttattggggccaaggcactcaagtgacagtctcgagcggcggaggatcccaagtgcagctgcaagagagcggcggaggaagcgtgcaagccggaggatctctgagactgagctgcgctgtgagcggctacgcctactccacatactgcatgggctggtttaggcaagcccccggcaaagagagagagggcgtggctgctatcgatagcggcggcagcacaagctacgccgatagcgtgaagggaaggttcacaatcagcaaggacaacgccaagaacacactgtatctgaggatgaactctctgaagccagaggacacagccatgtactactgtgctgctgtgcctcctcctccagatggcggcagctgtctgtttctgggaccagagatcaaggtcagcaaggccgattttaggtactggggccaaggcacacaagtgacagtctcgtctgctagccaccatcaccatcaccac

SEQ ID NO: 378 - DNA, 789 bp, Artificial Sequence
  Description of Artificial Sequence: Synthetic polynucleotide
caagtgcagctgcaagagagcggaggaggaagcgtccaagccggaggatctctgagactgagctgcgccgctagtggctactcctacagcagctactgcatgggctggtttaggcaagcccccggcaaggagagagaaggcgtggccactatcgacagcgacggcatgacaaggtacgccgacagcgtgaagggaaggttcacaatcagcaaggacaacgccaagaacacactgtatctgcagatgaactctctgaagccagaggacactgccatgtactactgtgccgctcctctgtacgactgtgatagcggcgctgtgggcagaaatccaccttattggggccaaggcactcaagtgacagtctcgagcggcggaggatcccaagtgcagctgcaagagagcggaggaggaagcgtgcaagccggaggctctctgaggctgagctgtacagtgtccggctacacttacagctccaattgcatgggctggtttaggcaagcccccggcaaggaaagagagggcgtggccactatctacactggcggcggcaacacatactacgccgatagcgtgaagggaaggttcactatcagccaagataacgccaagaacacagtgtatctgcagatgaacaatctgaagccagaggacactgccatgtactactgtgctgctgagccactgtctagggtgtacggcggcagctgcccaactcctacattcgactactggggccaaggcacacaagtgactgtctcgtctgctagccaccatcaccatcaccac

SEQ ID NO: 379 - DNA, 786 bp, Artificial Sequence
  Description of Artificial Sequence: Synthetic polynucleotide
caagtgcagctgcaagagagcggaggaggaagcgtccaagccggaggatctctgagactgagctgcgccgctagtggctactcctacagcagctactgcatgggctggtttaggcaagcccccggcaaggagagagaaggcgtggccactatcgacagcgacggcatgacaaggtacgccgacagcgtgaagggaaggttcacaatcagcaaggacaacgccaagaacacactgtatctgcagatgaactctctgaagccagaggacactgccatgtactactgtgccgctcctctgtacgactgtgatagcggcgctgtgggcagaaatccaccttattggggccaaggcactcaagtgacagtctcgagcggcggaggatcccaagtgcagctgcaagagagcggaggaggaagcgtccaagccggaggctctctgaggctgagctgtggagccagcggctacacttacagcagctactgtatgggctggtttaggcaagtgcccggcaaggagagagagggcgtggccgtgatcgattccgatggcagcacaagctacgctgacagcgtgaagggaaggttcacaatcagcaaggacaacggcaagaacacactctatctgcagatgaacagcctcaagccagaggacacagccatgtactactgcgccgctgatctgggccactataggcctccttgtggcgtgctgtatctgggcatggattactggggcaagggcacacaagtgacagtctcgtctgctagccaccatcaccatcaccac

SEQ ID NO: 380 - DNA, 789 bp, Artificial Sequence
  Description of Artificial Sequence: Synthetic polynucleotide
caagtgcagctgcaagagagcggaggaggaagcgtccaagccggaggatctctgagactgagctgcgccgctagtggctactcctacagcagctactgcatgggctggtttaggcaagcccccggcaaggagagagaaggcgtggccactatcgacagcgacggcatgacaaggtacgccgacagcgtgaagggaaggttcacaatcagcaaggacaacgccaagaacacactgtatctgcagatgaactctctgaagccagaggacactgccatgtactactgtgccgctcctctgtacgactgtgatagcggcgctgtgggcagaaatccaccttattggggccaaggcactcaagtgacagtctcgagcggcggaggatcccaagtgcagctgcaagagagcggaggaggaagcgtccaagccggaggctctctgagactgagctgtgccgccagcggctactccaactgcagctacgacatgacttggtataggcaagcccccggcaaggagagggagttcgtgtccgccatccacagcgacggcagcactagatacgccgacagcgtgaagggaaggttcttcatcagccaagataacgccaagaacacagtgtatctgcagatgaactccctcaagccagaggacactgccatgtactactgcaagacagacccactgcactgcagagcccatggcggcagctggtatagcgtgagggccaactactggggccaaggcacacaagtgacagtctcgtctgctagccaccatcaccatcaccac

SEQ ID NO: 381 - DNA, 777 bp, Artificial Sequence
  Description of Artificial Sequence: Synthetic polynucleotide
caagtgcagctgcaagagagcggaggcggcagcgtgcagactggaggctctctgagactgagctgtgctgccagcggctacacttatctgaggggctgtatgggctggtttaggcaagcccccggcaaggagagagagggcgtggccgtcatggatgtggtgggcgataggagaagctacatcgacagcgtgaagggaaggttcacaatctctagggacaatgccgccaacagcgtctatctgcagatggacaatctgaagccagaggacacagccatgtactactgcactgccggccctaactgtgtgggctggagaagcggactggattactggggccaaggcacacaagtgacagtctcgagcggcggaggatcccaagtgcagctgcaagagagcggaggaggaagcgtgcaagccggaggctctctgagactgagctgtgccgcctctaggtatctgtacagcatcgactacatggcttggttcagacagagccccggcaaggagagggagccagtggctgtcatctacactgcctccggcgccacattctatccagatagcgtgaagggaaggttcactatcagccaagataacgccaagatgacagtgtatctgcagatgaactctctgaagagcgaggacactgccatgtactactgtgccgccgtgaggaagacagatagctacctcttcgacgcccagagcttcacatactggggccaaggcacacaagtgacagtctcgtctgctagccaccatcaccatcaccac

SEQ ID NO: 382 - DNA, 789 bp, Artificial Sequence
  Description of Artificial Sequence: Synthetic polynucleotide
caagtgcagctgcaagagagcggaggcggcagcgtgcagactggaggctctctgagactgagctgtgctgccagcggctacacttatctgaggggctgtatgggctggtttaggcaagcccccggcaaggagagagagggcgtggccgtcatggatgtggtgggcgataggagaagctacatcgacagcgtgaagggaaggttcacaatctctagggacaatgccgccaacagcgtctatctgcagatggacaatctgaagccagaggacacagccatgtactactgcactgccggccctaactgtgtgggctggagaagcggactggattactggggccaaggcacacaagtgacagtctcgagcggcggaggatcccaagtgcagctgcaagagagcggaggaggaagcgtgcaagccggaggctctctgaggctgagctgtgccgcctctaggttcacatacagcagctactgcatgggctggttcagacaagcccccggcaaagagagagaaggcgtggccagcatcgatagcgatggctccactagctacactgacagcgtgaagggaaggttcactatcagcaaggacaacgccaagaacactctgtatctgcagatgaactctctgaagccagaggacacagccatgtactactgtgccctcgatctgatgagcacagtggtgcccggcttctgtggctttctgctgagcgctggcatggattactggggcaagggcactcaagtgactgtctcgtctgctagccaccatcaccatcaccac

SEQ ID NO: 383 - DNA, 795 bp, Artificial Sequence
  Description of Artificial Sequence: Synthetic polynucleotide
caagtgcagctgcaagagagcggaggcggcagcgtgcagactggaggctctctgagactgagctgtgctgccagcggctacacttatctgaggggctgtatgggctggtttaggcaagcccccggcaaggagagagagggcgtggccgtcatggatgtggtgggcgataggagaagctacatcgacagcgtgaagggaaggttcacaatctctagggacaatgccgccaacagcgtctatctgcagatggacaatctgaagccagaggacacagccatgtactactgcactgccggccctaactgtgtgggctggagaagcggactggattactggggccaaggcacacaagtgacagtctcgagcggcggaggatcccaagtgcagctgcaagagtccggaggaggcagcgtccaagccggaggctctctgaggctgagctgtgctgccagcggctacacttacagcatgtactgcatgggctggttcagacaagcccccggcaaggaaagagagggcgtggcccagatcaatagcgatggcagcacaagctacgccgacagcgtgaagggaaggttcactatctccaaggacaacgccaagaacactctgtatctgcagatgaactctctgaagccagaggacactgccatgtactactgcgctgccgattctagggtgtacggcggcagctggtatgagaggctctgcggcccttacacatacgagtacaactactggggccaaggcacacaagtgactgtctcgtctgctagccaccatcaccatcaccac

SEQ ID NO: 384 - DNA, 804 bp, Artificial Sequence
  Description of Artificial Sequence: Synthetic polynucleotide
caagtgcagctgcaagagagcggaggcggcagcgtgcagactggaggctctctgagactgagctgtgctgccagcggctacacttatctgaggggctgtatgggctggtttaggcaagcccccggcaaggagagagagggcgtggccgtcatggatgtggtgggcgataggagaagctacatcgacagcgtgaagggaaggttcacaatctctagggacaatgccgccaacagcgtctatctgcagatggacaatctgaagccagaggacacagccatgtactactgcactgccggccctaactgtgtgggctggagaagcggactggattactggggccaaggcacacaagtgacagtctcgagcggcggaggatcccaagtgcagctgcaagagagcggcggaggaagcgtgcaagccggaggatctctgagactgagctgcgctgtgagcggctacgcctactccacatactgcatgggctggtttaggcaagcccccggcaaagagagagagggcgtggctgctatcgatagcggcggcagcacaagctacgccgatagcgtgaagggaaggttcacaatcagcaaggacaacgccaagaacacactgtatctgaggatgaactctctgaagccagaggacacagccatgtactactgtgctgctgtgcctcctcctccagatggcggcagctgtctgtttctgggaccagagatcaaggtcagcaaggccgattttaggtactggggccaaggcacacaagtgacagtctcgtctgctagccaccatcaccatcaccac

SEQ ID NO: 385 - DNA, 783 bp, Artificial Sequence
  Description of Artificial Sequence: Synthetic polynucleotide
caagtgcagctgcaagagagcggaggcggcagcgtgcagactggaggctctctgagactgagctgtgctgccagcggctacacttatctgaggggctgtatgggctggtttaggcaagcccccggcaaggagagagagggcgtggccgtcatggatgtggtgggcgataggagaagctacatcgacagcgtgaagggaaggttcacaatctctagggacaatgccgccaacagcgtctatctgcagatggacaatctgaagccagaggacacagccatgtactactgcactgccggccctaactgtgtgggctggagaagcggactggattactggggccaaggcacacaagtgacagtctcgagcggcggaggatcccaagtgcagctgcaagagagcggaggaggaagcgtgcaagccggaggctctctgaggctgagctgtacagtgtccggctacacttacagctccaattgcatgggctggtttaggcaagcccccggcaaggaaagagagggcgtggccactatctacactggcggcggcaacacatactacgccgatagcgtgaagggaaggttcactatcagccaagataacgccaagaacacagtgtatctgcagatgaacaatctgaagccagaggacactgccatgtactactgtgctgctgagccactgtctagggtgtacggcggcagctgcccaactcctacattcgactactggggccaaggcacacaagtgactgtctcgtctgctagccaccatcaccatcaccac

SEQ ID NO: 386 - DNA, 780 bp, Artificial Sequence
  Description of Artificial Sequence: Synthetic polynucleotide
caagtgcagctgcaagagagcggaggcggcagcgtgcagactggaggctctctgagactgagctgtgctgccagcggctacacttatctgaggggctgtatgggctggtttaggcaagcccccggcaaggagagagagggcgtggccgtcatggatgtggtgggcgataggagaagctacatcgacagcgtgaagggaaggttcacaatctctagggacaatgccgccaacagcgtctatctgcagatggacaatctgaagccagaggacacagccatgtactactgcactgccggccctaactgtgtgggctggagaagcggactggattactggggccaaggcacacaagtgacagtctcgagcggcggaggatcccaagtgcagctgcaagagagcggaggaggaagcgtccaagccggaggctctctgaggctgagctgtggagccagcggctacacttacagcagctactgtatgggctggtttaggcaagtgcccggcaaggagagagagggcgtggccgtgatcgattccgatggcagcacaagctacgctgacagcgtgaagggaaggttcacaatcagcaaggacaacggcaagaacacactctatctgcagatgaacagcctcaagccagaggacacagccatgtactactgcgccgctgatctgggccactataggcctccttgtggcgtgctgtatctgggcatggattactggggcaagggcacacaagtgacagtctcgtctgctagccaccatcaccatcaccac

SEQ ID NO: 387 - DNA, 783 bp, Artificial Sequence
  Description of Artificial Sequence: Synthetic polynucleotide
caagtgcagctgcaagagagcggaggcggcagcgtgcagactggaggctctctgagactgagctgtgctgccagcggctacacttatctgaggggctgtatgggctggtttaggcaagcccccggcaaggagagagagggcgtggccgtcatggatgtggtgggcgataggagaagctacatcgacagcgtgaagggaaggttcacaatctctagggacaatgccgccaacagcgtctatctgcagatggacaatctgaagccagaggacacagccatgtactactgcactgccggccctaactgtgtgggctggagaagcggactggattactggggccaaggcacacaagtgacagtctcgagcggcggaggatcccaagtgcagctgcaagagagcggaggaggaagcgtccaagccggaggctctctgagactgagctgtgccgccagcggctactccaactgcagctacgacatgacttggtataggcaagcccccggcaaggagagggagttcgtgtccgccatccacagcgacggcagcactagatacgccgacagcgtgaagggaaggttcttcatcagccaagataacgccaagaacacagtgtatctgcagatgaactccctcaagccagaggacactgccatgtactactgcaagacagacccactgcactgcagagcccatggcggcagctggtatagcgtgagggccaactactggggccaaggcacacaagtgacagtctcgtctgctagccaccatcaccatcaccac

SEQ ID NO: 388 - protein, 5 aa, Artificial Sequence
  Description of Artificial Sequence: Synthetic peptide
IDYMA

SEQ ID NO: 389 - protein, 17 aa, Artificial Sequence
  Description of Artificial Sequence: Synthetic peptide
VIYTASGATFYPDSVKG

SEQ ID NO: 390 - protein, 16 aa, Artificial Sequence
  Description of Artificial Sequence: Synthetic peptide
VRKTDSYLFDAQSFTY

SEQ ID NO: 391 - protein, 5 aa, Artificial Sequence
  Description of Artificial Sequence: Synthetic peptide
SYCMG

SEQ ID NO: 392 - protein, 16 aa, Artificial Sequence
  Description of Artificial Sequence: Synthetic peptide
SIDSDGSTSYTDSVKG

SEQ ID NO: 393 - protein, 21 aa, Artificial Sequence
  Description of Artificial Sequence: Synthetic peptide
DLMSTVVPGFCGFLLSAGMDY

SEQ ID NO: 394 - protein, 5 aa, Artificial Sequence
  Description of Artificial Sequence: Synthetic peptide
MYCMG

SEQ ID NO: 395 - protein, 16 aa, Artificial Sequence
  Description of Artificial Sequence: Synthetic peptide
QINSDGSTSYADSVKG

SEQ ID NO: 396 - protein, 23 aa, Artificial Sequence
  Description of Artificial Sequence: Synthetic peptide
DSRVYGGSWYERLCGPYTYEYNY

SEQ ID NO: 397 - protein, 5 aa, Artificial Sequence
  Description of Artificial Sequence: Synthetic peptide
TYCMG

SEQ ID NO: 398 - protein, 16 aa, Artificial Sequence
  Description of Artificial Sequence: Synthetic peptide
AIDSGGSTSYADSVKG

SEQ ID NO: 399 - protein, 26 aa, Artificial Sequence
  Description of Artificial Sequence: Synthetic peptide
VPPPPDGGSCLFLGPEIKVSKADFRY

SEQ ID NO: 400 - protein, 5 aa, Artificial Sequence
  Description of Artificial Sequence: Synthetic peptide
SNCMG

SEQ ID NO: 401 - protein, 17 aa, Artificial Sequence
  Description of Artificial Sequence: Synthetic peptide
TIYTGGGNTYYADSVKG

SEQ ID NO: 402 - protein, 18 aa, Artificial Sequence
  Description of Artificial Sequence: Synthetic peptide
EPLSRVYGGSCPTPTFDY

SEQ ID NO: 403 - protein, 5 aa, Artificial Sequence
  Description of Artificial Sequence: Synthetic peptide
SYCMG

SEQ ID NO: 404 - protein, 16 aa, Artificial Sequence
  Description of Artificial Sequence: Synthetic peptide
VIDSDGSTSYADSVKG

SEQ ID NO: 405 - protein, 18 aa, Artificial Sequence
  Description of Artificial Sequence: Synthetic peptide
DLGHYRPPCGVLYLGMDY

SEQ ID NO: 406 - protein, 5 aa, Artificial Sequence
  Description of Artificial Sequence: Synthetic peptide
SYDMT

SEQ ID NO: 407 - protein, 16 aa, Artificial Sequence
  Description of Artificial Sequence: Synthetic peptide
AIHSDGSTRYADSVKG

SEQ ID NO: 408 - protein, 19 aa, Artificial Sequence
  Description of Artificial Sequence: Synthetic peptide
DPLHCRAHGGSWYSVRANY

SEQ ID NO: 409 - protein, 5 aa, Artificial Sequence
  Description of Artificial Sequence: Synthetic peptide
SGCMG

SEQ ID NO: 410 - protein, 16 aa, Artificial Sequence
  Description of Artificial Sequence: Synthetic peptide
AINSDGSTSYADSVKG

SEQ ID NO: 411 - protein, 10 aa, Artificial Sequence
  Description of Artificial Sequence: Synthetic peptide
EPYCSGGYPR

SEQ ID NO: 412 - protein, 5 aa, Artificial Sequence
  Description of Artificial Sequence: Synthetic peptide
SYCMG

SEQ ID NO: 413 - protein, 16 aa, Artificial Sequence
  Description of Artificial Sequence: Synthetic peptide
HIDSDGSTSYADSVKG

SEQ ID NO: 414 - protein, 16 aa, Artificial Sequence
  Description of Artificial Sequence: Synthetic peptide
DPIPGPGYCDGGPNKY

SEQ ID NO: 415 - protein, 5 aa, Artificial Sequence
  Description of Artificial Sequence: Synthetic peptide
SYCMG

SEQ ID NO: 416 - protein, 16 aa, Artificial Sequence
  Description of Artificial Sequence: Synthetic peptide
TIDSDGMTRYADSVKG

SEQ ID NO: 417 - protein, 14 aa, Artificial Sequence
  Description of Artificial Sequence: Synthetic peptide
DADCTIAAMTTNPL

SEQ ID NO: 418 - protein, 5 aa, Artificial Sequence
  Description of Artificial Sequence: Synthetic peptide
VNYMG

SEQ ID NO: 419 - protein, 17 aa, Artificial Sequence
  Description of Artificial Sequence: Synthetic peptide
TIFTGAGTTYYANSVKG

SEQ ID NO: 420 - protein, 17 aa, Artificial Sequence
  Description of Artificial Sequence: Synthetic peptide
DFRGGLLYRPAYEYTYR

SEQ ID NO: 421 - protein, 5 aa, Artificial Sequence
  Description of Artificial Sequence: Synthetic peptide
VNYMG

SEQ ID NO: 422 - protein, 17 aa, Artificial Sequence
  Description of Artificial Sequence: Synthetic peptide
TIFTGAGTTYYANSVKG

SEQ ID NO: 423 - protein, 17 aa, Artificial Sequence
  Description of Artificial Sequence: Synthetic peptide
DFRGGLLYRPAYEYTYR

SEQ ID NO: 424 - protein, 5 aa, Artificial Sequence
  Description of Artificial Sequence: Synthetic peptide
SYCMG

SEQ ID NO: 425 - protein, 16 aa, Artificial Sequence
  Description of Artificial Sequence: Synthetic peptide
TIDSDGMTRYADSVKG

SEQ ID NO: 426 - protein, 16 aa, Artificial Sequence
  Description of Artificial Sequence: Synthetic peptide
PLYDCDSGAVGRNPPY

SEQ ID NO: 427 - protein, 5 aa, Artificial Sequence
  Description of Artificial Sequence: Synthetic peptide
RGCMG

SEQ ID NO: 428 - protein, 17 aa, Artificial Sequence
  Description of Artificial Sequence: Synthetic peptide
VMDVVGDRRSYIDSVKG

SEQ ID NO: 429 - protein, 13 aa, Artificial Sequence
  Description of Artificial Sequence: Synthetic peptide
GPNCVGWRSGLDY

SEQ ID NO: 430 - protein, 8 aa, Artificial Sequence
  Description of Artificial Sequence: Synthetic peptide
ASHHHHHH

SEQ ID NO: 431 - protein, 800 aa, Artificial Sequence
  Description of Artificial Sequence: Synthetic polypeptide
  SITE (1)..(20): This region may encompass 1-20 residues
  SITE (21)..(40): This region may encompass 1-20 residues
  SITE (41)..(60): This region may encompass 1-20 residues
  SITE (61)..(80): This region may encompass 1-20 residues
  SITE (81)..(100): This region may encompass 1-20 residues
  SITE (101)..(120): This region may encompass 1-20 residues
  SITE (121)..(140): This region may encompass 1-20 residues
  SITE (141)..(160): This region may encompass 1-20 residues
  SITE (161)..(180): This region may encompass 1-20 residues
  SITE (181)..(200): This region may encompass 1-20 residues
  SITE (201)..(220): This region may encompass 1-20 residues
  SITE (221)..(240): This region may encompass 1-20 residues
  SITE (241)..(260): This region may encompass 1-20 residues
  SITE (261)..(280): This region may encompass 1-20 residues
  SITE (281)..(300): This region may encompass 1-20 residues
  SITE (301)..(320): This region may encompass 1-20 residues
  SITE (321)..(340): This region may encompass 1-20 residues
  SITE (341)..(360): This region may encompass 1-20 residues
  SITE (361)..(380): This region may encompass 1-20 residues
  SITE (381)..(400): This region may encompass 1-20 residues
  SITE (401)..(420): This region may encompass 1-20 residues
  SITE (421)..(440): This region may encompass 1-20 residues
  SITE (441)..(460): This region may encompass 1-20 residues
  SITE (461)..(480): This region may encompass 1-20 residues
  SITE (481)..(500): This region may encompass 1-20 residues
  SITE (501)..(520): This region may encompass 1-20 residues
  SITE (521)..(540): This region may encompass 1-20 residues
  SITE (541)..(560): This region may encompass 1-20 residues
  SITE (561)..(580): This region may encompass 1-20 residues
  SITE (581)..(600): This region may encompass 1-20 residues
  SITE (601)..(620): This region may encompass 1-20 residues
  SITE (621)..(640): This region may encompass 1-20 residues
  SITE (641)..(660): This region may encompass 1-20 residues
  SITE (661)..(680): This region may encompass 1-20 residues
  SITE (681)..(700): This region may encompass 1-20 residues
  SITE (701)..(720): This region may encompass 1-20 residues
  SITE (721)..(740): This region may encompass 1-20 residues
  SITE (741)..(760): This region may encompass 1-20 residues
  SITE (761)..(780): This region may encompass 1-20 residues
  SITE (781)..(800): This region may encompass 1-20 residues
  SITE (1)..(800): This sequence may encompass 1-20 "(Gly)m(Ser)o" repeating units, wherein m = 1 to 20, o = 1 to 20
  See specification as filed for detailed description of substitutions and preferred embodiments
GGGGGGGGGGGGGGGGGGGGSSSSSSSSSSSSSSSSSSSSGGGGGGGGGGGGGGGGGGGGSSSSSSSSSSSSSSSSSSSSGGGGGGGGGGGGGGGGGGGGSSSSSSSSSSSSSSSSSSSSGGGGGGGGGGGGGGGGGGGGSSSSSSSSSSSSSSSSSSSSGGGGGGGGGGGGGGGGGGGGSSSSSSSSSSSSSSSSSSSSGGGGGGGGGGGGGGGGGGGGSSSSSSSSSSSSSSSSSSSSGGGGGGGGGGGGGGGGGGGGSSSSSSSSSSSSSSSSSSSSGGGGGGGGGGGGGGGGGGGGSSSSSSSSSSSSSSSSSSSSGGGGGGGGGGGGGGGGGGGGSSSSSSSSSSSSSSSSSSSSGGGGGGGGGGGGGGGGGGGGSSSSSSSSSSSSSSSSSSSSGGGGGGGGGGGGGGGGGGGGSSSSSSSSSSSSSSSSSSSSGGGGGGGGGGGGGGGGGGGGSSSSSSSSSSSSSSSSSSSSGGGGGGGGGGGGGGGGGGGGSSSSSSSSSSSSSSSSSSSSGGGGGGGGGGGGGGGGGGGGSSSSSSSSSSSSSSSSSSSSGGGGGGGGGGGGGGGGGGGGSSSSSSSSSSSSSSSSSSSSGGGGGGGGGGGGGGGGGGGGSSSSSSSSSSSSSSSSSSSSGGGGGGGGGGGGGGGGGGGGSSSSSSSSSSSSSSSSSSSSGGGGGGGGGGGGGGGGGGGGSSSSSSSSSSSSSSSSSSSSGGGGGGGGGGGGGGGGGGGGSSSSSSSSSSSSSSSSSSSSGGGGGGGGGGGGGGGGGGGGSSSSSSSSSSSSSSSSSSSS

SEQ ID NO: 432 - protein, 100 aa, Artificial Sequence
  Description of Artificial Sequence: Synthetic polypeptide
  SITE (1)..(100): This sequence may encompass 1-20 "Gly Ser Gly Gly Ser" repeating units
  See specification as filed for detailed description of substitutions and preferred embodiments
GSGGSGSGGSGSGGSGSGGSGSGGSGSGGSGSGGSGSGGSGSGGSGSGGSGSGGSGSGGSGSGGSGSGGSGSGGSGSGGSGSGGSGSGGSGSGGSGSGGS

SEQ ID NO: 433 - protein, 1200 aa, Artificial Sequence
  Description of Artificial Sequence: Synthetic polypeptide
  SITE (1)..(20): This region may encompass 1-20 residues
  SITE (21)..(40): This region may encompass 1-20 residues
  SITE (41)..(60): This region may encompass 1-20 residues
  SITE (61)..(80): This region may encompass 1-20 residues
  SITE (81)..(100): This region may encompass 1-20 residues
  SITE (101)..(120): This region may encompass 1-20 residues
  SITE (121)..(140): This region may encompass 1-20 residues
  SITE (141)..(160): This region may encompass 1-20 residues
  SITE (161)..(180): This region may encompass 1-20 residues
  SITE (181)..(200): This region may encompass 1-20 residues
  SITE (201)..(220): This region may encompass 1-20 residues
  SITE (221)..(240): This region may encompass 1-20 residues
  SITE (241)..(260): This region may encompass 1-20 residues
  SITE (261)..(280): This region may encompass 1-20 residues
  SITE (281)..(300): This region may encompass 1-20 residues
  SITE (301)..(320): This region may encompass 1-20 residues
  SITE (321)..(340): This region may encompass 1-20 residues
  SITE (341)..(360): This region may encompass 1-20 residues
  SITE (361)..(380): This region may encompass 1-20 residues
  SITE (381)..(400): This region may encompass 1-20 residues
  SITE (401)..(420): This region may encompass 1-20 residues
  SITE (421)..(440): This region may encompass 1-20 residues
  SITE (441)..(460): This region may encompass 1-20 residues
  SITE (461)..(480): This region may encompass 1-20 residues
  SITE (481)..(500): This region may encompass 1-20 residues
  SITE (501)..(520): This region may encompass 1-20 residues
  SITE (521)..(540): This region may encompass 1-20 residues
  SITE (541)..(560): This region may encompass 1-20 residues
  SITE (561)..(580): This region may encompass 1-20 residues
  SITE (581)..(600): This region may encompass 1-20 residues
  SITE (601)..(620): This region may encompass 1-20 residues
  SITE (621)..(640): This region may encompass 1-20 residues
  SITE (641)..(660): This region may encompass 1-20 residues
  SITE (661)..(680): This region may encompass 1-20 residues
  SITE (681)..(700): This region may encompass 1-20 residues
  SITE (701)..(720): This region may encompass 1-20 residues
  SITE (721)..(740): This region may encompass 1-20 residues
  SITE (741)..(760): This region may encompass 1-20 residues
  SITE (761)..(780): This region may encompass 1-20 residues
  SITE (781)..(800): This region may encompass 1-20 residues
  SITE (801)..(820): This region may encompass 1-20 residues
  SITE (821)..(840): This region may encompass 1-20 residues
  SITE (841)..(860): This region may encompass 1-20 residues
  SITE (861)..(880): This region may encompass 1-20 residues
  SITE (881)..(900): This region may encompass 1-20 residues
  SITE (901)..(920): This region may encompass 1-20 residues
  SITE (921)..(940): This region may encompass 1-20 residues
  SITE (941)..(960): This region may encompass 1-20 residues
  SITE (961)..(980): This region may encompass 1-20 residues
  SITE (981)..(1000): This region may encompass 1-20 residues
  SITE (1001)..(1020): This region may encompass 1-20 residues
  SITE (1021)..(1040): This region may encompass 1-20 residues
  SITE (1041)..(1060): This region may encompass 1-20 residues
  SITE (1061)..(1080): This region may encompass 1-20 residues
  SITE (1081)..(1100): This region may encompass 1-20 residues
  SITE (1101)..(1120): This region may encompass 1-20 residues
  SITE (1121)..(1140): This region may encompass 1-20 residues
  SITE (1141)..(1160): This region may encompass 1-20 residues
  SITE (1161)..(1180): This region may encompass 1-20 residues
  SITE (1181)..(1200): This region may encompass 1-20 residues
  SITE (1)..(1200): This sequence may encompass 1-20 "(Gly)m(Ser)o(Gly)m" repeating units, wherein m = 1 to 20, o = 1 to 20
  See specification as filed for detailed description of substitutions and preferred embodiments
GGGGGGGGGGGGGGGGGGGGSSSSSSSSSSSSSSSSSSSSGGGGGGGGGGGGGGGGGGGGGGGGGGGGGGGGGGGGGGGGSSSSSSSSSSSSSSSSSSSSGGGGGGGGGGGGGGGGGGGGGGGGGGGGGGGGGGGGGGGGSSSSSSSSSSSSSSSSSSSSGGGGGGGGGGGGGGGGGGGGGGGGGGGGGGGGGGGGGGGGSSSSSSSSSSSSSSSSSSSSGGGGGGGGGGGGGGGGGGGGGGGGGGGGGGGGGGGGGGGGSSSSSSSSSSSSSSSSSSSSGGGGGGGGGGGGGGGGGGGGGGGGGGGGGGGGGGGGGGGGSSSSSSSSSSSSSSSSSSSSGGGGGGGGGGGGGGGGGGGGGGGGGGGGGGGGGGGGGGGGSSSSSSSSSSSSSSSSSSSSGGGGGGGGGGGGGGGGGGGGGGGGGGGGGGGGGGGGGGGGSSSSSSSSSSSSSSSSSSSSGGGGGGGGGGGGGGGGGGGGGGGGGGGGGGGGGGGGGGGGSSSSSSSSSSSSSSSSSSSSGGGGGGGGGGGGGGGGGGGGGGGGGGGGGGGGGGGGGGGGSSSSSSSSSSSSSSSSSSSSGGGGGGGGGGGGGGGGGGGGGGGGGGGGGGGGGGGGGGGGSSSSSSSSSSSSSSSSSSSSGGGGGGGGGGGGGGGGGGGGGGGGGGGGGGGGGGGGGGGGSSSSSSSSSSSSSSSSSSSSGGGGGGGGGGGGGGGGGGGGGGGGGGGGGGGGGGGGGGGGSSSSSSSSSSSSSSSSSSSSGGGGGGGGGGGGGGGGGGGGGGGGGGGGGGGGGGGGGGGGSSSSSSSSSSSSSSSSSSSSGGGGGGGGGGGGGGGGGGGGGGGGGGGGGGGGGGGGGGGGSSSSSSSSSSSSSSSSSSSSGGGGGGGGGGGGGGGGGGGGGGGGGGGGGGGGGGGGGGGGSSSSSSSSSSSSSSSSSSSSGGGGGGGGGGGGGGGGGGGGGGGGGGGGGGGGGGGGGGGGSSSSSSSSSSSSSSSSSSSSGGGGGGGGGGGGGGGGGGGGGGGGGGGGGGGGGGGGGGGGSSSSSSSSSSSSSSSSSSSSGGGGGGGGGGGGGGGGGGGGGGGGGGGGGGGGGGGGGGGGSSSSSSSSSSSSSSSSSSSSGGGGGGGGGGGGGGGGGGGGGGGGGGGGGGGGGGGGGGGGSSSSSSSSSSSSSSSSSSSSGGGGGGGGGGGGGGGGGGGG

SEQ ID NO: 434 - protein, 2000 aa, Artificial Sequence
  Description of Artificial Sequence: Synthetic polypeptide
  SITE (1)..(20): This region may encompass 1-20 residues
  SITE (21)..(40): This region may encompass 1-20 residues
  SITE (41)..(60): This region may encompass 1-20 residues
  SITE (61)..(80): This region may encompass 1-20 residues
  SITE (81)..(100): This region may encompass 1-20 residues
  SITE (101)..(120): This region may encompass 1-20 residues
  SITE (121)..(140): This region may encompass 1-20 residues
  SITE (141)..(160): This region may encompass 1-20 residues
  SITE (161)..(180): This region may encompass 1-20 residues
  SITE (181)..(200): This region may encompass 1-20 residues
  SITE (201)..(220): This region may encompass 1-20 residues
  SITE (221)..(240): This region may encompass 1-20 residues
  SITE (241)..(260): This region may encompass 1-20 residues
  SITE (261)..(280): This region may encompass 1-20 residues
  SITE (281)..(300): This region may encompass 1-20 residues
  SITE (301)..(320): This region may encompass 1-20 residues
  SITE (321)..(340): This region may encompass 1-20 residues
  SITE (341)..(360): This region may encompass 1-20 residues
  SITE (361)..(380): This region may encompass 1-20 residues
  SITE (381)..(400): This region may encompass 1-20 residues
  SITE (401)..(420): This region may encompass 1-20 residues
  SITE (421)..(440): This region may encompass 1-20 residues
  SITE (441)..(460): This region may encompass 1-20 residues
  SITE (461)..(480): This region may encompass 1-20 residues
  SITE (481)..(500): This region may encompass 1-20 residues
  SITE (501)..(520): This region may encompass 1-20 residues
  SITE (521)..(540): This region may encompass 1-20 residues
  SITE (541)..(560): This region may encompass 1-20 residues
  SITE (561)..(580): This region may encompass 1-20 residues
  SITE (581)..(600): This region may encompass 1-20 residues
  SITE (601)..(620): This region may encompass 1-20 residues
  SITE (621)..(640): This region may encompass 1-20 residues
  SITE (641)..(660): This region may encompass 1-20 residues
  SITE (661)..(680): This region may encompass 1-20 residues
  SITE (681)..(700): This region may encompass 1-20 residues
  SITE (701)..(720): This region may encompass 1-20 residues
  SITE (721)..(740): This region may encompass 1-20 residues
  SITE (741)..(760): This region may encompass 1-20 residues
  SITE (761)..(780): This region may encompass 1-20 residues
  SITE (781)..(800): This region may encompass 1-20 residues
  SITE (801)..(820): This region may encompass 1-20 residues
  SITE (821)..(840): This region may encompass 1-20 residues
  SITE (841)..(860): This region may encompass 1-20 residues
  SITE (861)..(880): This region may encompass 1-20 residues
  SITE (881)..(900): This region may encompass 1-20 residues
  SITE (901)..(920): This region may encompass 1-20 residues
  SITE (921)..(940): This region may encompass 1-20 residues
  SITE (941)..(960): This region may encompass 1-20 residues
  SITE (961)..(980): This region may encompass 1-20 residues
  SITE (981)..(1000): This region may encompass 1-20 residues
  SITE (1001)..(1020): This region may encompass 1-20 residues
  SITE (1021)..(1040): This region may encompass 1-20 residues
  SITE (1041)..(1060): This region may encompass 1-20 residues
  SITE (1061)..(1080): This region may encompass 1-20 residues
  SITE (1081)..(1100): This region may encompass 1-20 residues
  SITE (1101)..(1120): This region may encompass 1-20 residues
  SITE (1121)..(1140): This region may encompass 1-20 residues
  SITE (1141)..(1160): This region may encompass 1-20 residues
  SITE (1161)..(1180): This region may encompass 1-20 residues
  SITE (1181)..(1200): This region may encompass 1-20 residues
  SITE (1201)..(1220): This region may encompass 1-20 residues
  SITE (1221)..(1240): This region may encompass 1-20 residues
  SITE (1241)..(1260): This region may encompass 1-20 residues
  SITE (1261)..(1280): This region may encompass 1-20 residues
  SITE (1281)..(1300): This region may encompass 1-20 residues
  SITE (1301)..(1320): This region may encompass 1-20 residues
  SITE (1321)..(1340): This region may encompass 1-20 residues
  SITE (1341)..(1360): This region may encompass 1-20 residues
  SITE (1361)..(1380): This region may encompass 1-20 residues
  SITE (1381)..(1400): This region may encompass 1-20 residues
  SITE (1401)..(1420): This region may encompass 1-20 residues
  SITE (1421)..(1440): This region may encompass 1-20 residues
  SITE (1441)..(1460): This region may encompass 1-20 residues
  SITE (1461)..(1480): This region may encompass 1-20 residues
  SITE (1481)..(1500): This region may encompass 1-20 residues
  SITE (1501)..(1520): This region may encompass 1-20 residues
  SITE (1521)..(1540): This region may encompass 1-20 residues
  SITE (1541)..(1560): This region may encompass 1-20 residues
  SITE (1561)..(1580): This region may encompass 1-20 residues
  SITE (1581)..(1600): This region may encompass 1-20 residues
  SITE (1601)..(1620): This region may encompass 1-20 residues
  SITE (1621)..(1640): This region may encompass 1-20 residues
  SITE (1641)..(1660): This region may encompass 1-20 residues
  SITE (1661)..(1680): This region may encompass 1-20 residues
  SITE (1681)..(1700): This region may encompass 1-20 residues
  SITE (1701)..(1720): This region may encompass 1-20 residues
  SITE (1721)..(1740): This region may encompass 1-20 residues
  SITE (1741)..(1760): This region may encompass 1-20 residues
  SITE (1761)..(1780): This region may encompass 1-20 residues
  SITE (1781)..(1800): This region may encompass 1-20 residues
  SITE (1801)..(1820): This region may encompass 1-20 residues
  SITE (1821)..(1840): This region may encompass 1-20 residues
  SITE (1841)..(1860): This region may encompass 1-20 residues
  SITE (1861)..(1880): This region may encompass 1-20 residues
  SITE (1881)..(1900): This region may encompass 1-20 residues
  SITE (1901)..(1920): This region may encompass 1-20 residues
  SITE (1921)..(1940): This region may encompass 1-20 residues
  SITE (1941)..(1960): This region may encompass 1-20 residues
  SITE (1961)..(1980): This region may encompass 1-20 residues
  SITE (1981)..(2000): This region may encompass 1-20 residues
  SITE (1)..(2000): This sequence may encompass 1-20 "(Gly)m(Ser)o(Gly)m(Ser)o(Gly)m" repeating units, wherein m = 1 to 20, o = 1 to 20
  See specification as filed for detailed description of substitutions and preferred embodiments
GGGGGGGGGGGGGGGGGGGGSSSSSSSSSSSSSSSSSSSSGGGGGGGGGGGGGGGGGGGGSSSSSSSSSSSSSSSSSSSSGGGGGGGGGGGGGGGGGGGGGGGGGGGGGGGGGGGGGGGGSSSSSSSSSSSSSSSSSSSSGGGGGGGGGGGGGGGGGGGGSSSSSSSSSSSSSSSSSSSSGGGGGGGGGGGGGGGGGGGGGGGGGGGGGGGGGGGGGGGGSSSSSSSSSSSSSSSSSSSSGGGGGGGGGGGGGGGGGGGGSSSSSSSSSSSSSSSSSSSSGGGGGGGGGGGGGGGGGGGGGGGGGGGGGGGGGGGGGGGGSSSSSSSSSSSSSSSSSSSSGGGGGGGGGGGGGGGGGGGGSSSSSSSSSSSSSSSSSSSSGGGGGGGGGGGGGGGGGGGGGGGGGGGGGGGGGGGGGGGGSSSSSSSSSSSSSSSSSSSSGGGGGGGGGGGGGGGGGGGGSSSSSSSSSSSSSSSSSSSSGGGGGGGGGGGGGGGGGGGGGGGGGGGGGGGGGGGGGGGGSSSSSSSSSSSSSSSSSSSSGGGGGGGGGGGGGGGGGGGGSSSSSSSSSSSSSSSSSSSSGGGGGGGGGGGGGGGGGGGGGGGGGGGGGGGGGGGGGGGGSSSSSSSSSSSSSSSSSSSSGGGGGGGGGGGGGGGGGGGGSSSSSSSSSSSSSSSSSSSSGGGGGGGGGGGGGGGGGGGGGGGGGGGGGGGGGGGGGGGGSSSSSSSSSSSSSSSSSSSSGGGGGGGGGGGGGGGGGGGGSSSSSSSSSSSSSSSSSSSSGGGGGGGGGGGGGGGGGGGGGGGGGGGGGGGGGGGGGGGGSSSSSSSSSSSSSSSSSSSSGGGGGGGGGGGGGGGGGGGGSSSSSSSSSSSSSSSSSSSSGGGGGGGGGGGGGGGGGGGGGGGGGGGGGGGGGGGGGGGGSSSSSSSSSSSSSSSSSSSSGGGGGGGGGGGGGGGGGGGGSSSSSSSSSSSSSSSSSSSSGGGGGGGGGGGGGGGGGGGGGGGGGGGGGGGGGGGGGGGGSSSSSSSSSSSSSSSSSSSSGGGGGGGGGGGGGGGGGGGGSSSSSSSSSSSSSSSSSSSSGGGGGGGGGGGGGGGGGGGGGGGGGGGGGGGGGGGGGGGGSSSSSSSSSSSSSSSSSSSSGGGGGGGGGGGGGGGGGGGGSSSSSSSSSSSSSSSSSSSSGGGGGGGGGGGGGGGGGGGGGGGGGGGGGGGGGGGGGGGGSSSSSSSSSSSSSSSSSSSSGGGGGGGGGGGGGGGGGGGGSSSSSSSSSSSSSSSSSSSSGGGGGGGGGGGGGGGGGGGGGGGGGGGGGGGGGGGGGGGGSSSSSSSSSSSSSSSSSSSSGGGGGGGGGGGGGGGGGGGGSSSSSSSSSSSSSSSSSSSSGGGGGGGGGGGGGGGGGGGGGGGGGGGGGGGGGGGGGGGGSSSSSSSSSSSSSSSSSSSSGGGGGGGGGGGGGGGGGGGGSSSSSSSSSSSSSSSSSSSSGGGGGGGGGGGGGGGGGGGGGGGGGGGGGGGGGGGGGGGGSSSSSSSSSSSSSSSSSSSSGGGGGGGGGGGGGGGGGGGGSSSSSSSSSSSSSSSSSSSSGGGGGGGGGGGGGGGGGGGGGGGGGGGGGGGGGGGGGGGGSSSSSSSSSSSSSSSSSSSSGGGGGGGGGGGGGGGGGGGGSSSSSSSSSSSSSSSSSSSSGGGGGGGGGGGGGGGGGGGGGGGGGGGGGGGGGGGGGGGGSSSSSSSSSSSSSSSSSSSSGGGGGGGGGGGGGGGGGGGGSSSSSSSSSSSSSSSSSSSSGGGGGGGGGGGGGGGGGGGGGGGGGGGGGGGGGGGGGGGGSSSSSSSSSSSSSSSSSSSSGGGGGGGGGGGGGGGGGGGGSSSSSSSSSSSSSSSSSSSSGGGGGGGGGGGGGGGGGGGGGGGGGGGGGGGGGGGGGGGGSSSSSSSSSSSSSSSSSSSSGGGGGGGGGGGGGGGGGGGGSSSSSSSSSSSSSSSSSSSSGGGGGGGGGGGGGGGGGGGG

SEQ ID NO: 435 - protein, 480 aa, Artificial Sequence
  Description of Artificial Sequence: Synthetic polypeptide
  SITE (5)..(24): This region may encompass 1-20 residues
  SITE (29)..(48): This region may encompass 1-20 residues
  SITE (53)..(72): This region may encompass 1-20 residues
  SITE (77)..(96): This region may encompass 1-20 residues
  SITE (101)..(120): This region may encompass 1-20 residues
  SITE (125)..(144): This region may encompass 1-20 residues
  SITE (149)..(168): This region may encompass 1-20 residues
  SITE (173)..(192): This region may encompass 1-20 residues
  SITE (197)..(216): This region may encompass 1-20 residues
  SITE (221)..(240): This region may encompass 1-20 residues
  SITE (245)..(264): This region may encompass 1-20 residues
  SITE (269)..(288): This region may encompass 1-20 residues
  SITE (293)..(312): This region may encompass 1-20 residues
  SITE (317)..(336): This region may encompass 1-20 residues
  SITE (341)..(360): This region may encompass 1-20 residues
  SITE (365)..(384): This region may encompass 1-20 residues
  SITE (389)..(408): This region may encompass 1-20 residues
  SITE (413)..(432): This region may encompass 1-20 residues
  SITE (437)..(456): This region may encompass 1-20 residues
  SITE (461)..(480): This region may encompass 1-20 residues
  SITE (1)..(480): This sequence may encompass 1-20 "(Gly)(Ser)(Gly)(Gly)(Ser)m" repeating units, wherein m = 1 to 20
  See specification as filed for detailed description of substitutions and preferred embodiments
GSGGSSSSSSSSSSSSSSSSSSSSGSGGSSSSSSSSSSSSSSSSSSSSGSGGSSSSSSSSSSSSSSSSSSSSGSGGSSSSSSSSSSSSSSSSSSSSGSGGSSSSSSSSSSSSSSSSSSSSGSGGSSSSSSSSSSSSSSSSSSSSGSGGSSSSSSSSSSSSSSSSSSSSGSGGSSSSSSSSSSSSSSSSSSSSGSGGSSSSSSSSSSSSSSSSSSSSGSGGSSSSSSSSSSSSSSSSSSSSGSGGSSSSSSSSSSSSSSSSSSSSGSGGSSSSSSSSSSSSSSSSSSSSGSGGSSSSSSSSSSSSSSSSSSSSGSGGSSSSSSSSSSSSSSSSSSSSGSGGSSSSSSSSSSSSSSSSSSSSGSGGSSSSSSSSSSSSSSSSSSSSGSGGSSSSSSSSSSSSSSSSSSSSGSGGSSSSSSSSSSSSSSSSSSSSGSGGSSSSSSSSSSSSSSSSSSSSGSGGSSSSSSSSSSSSSSSSSSSS

SEQ ID NO: 436 - protein, 480 aa, Artificial Sequence
  Description of Artificial Sequence: Synthetic polypeptide
  SITE (4)..(23): This region may encompass 1-20 residues
  SITE (28)..(47): This region may encompass 1-20 residues
  SITE (52)..(71): This region may encompass 1-20 residues
  SITE (76)..(95): This region may encompass 1-20 residues
  SITE (100)..(119): This region may encompass 1-20 residues
  SITE (124)..(143): This region may encompass 1-20 residues
  SITE (148)..(167): This region may encompass 1-20 residues
  SITE (172)..(191): This region may encompass 1-20 residues
  SITE (196)..(215): This region may encompass 1-20 residues
  SITE (220)..(239): This region may encompass 1-20 residues
  SITE (244)..(263): This region may encompass 1-20 residues
  SITE (268)..(287): This region may encompass 1-20 residues
  SITE (292)..(311): This region may encompass 1-20 residues
  SITE (316)..(335): This region may encompass 1-20 residues
  SITE (340)..(359): This region may encompass 1-20 residues
  SITE (364)..(383): This region may encompass 1-20 residues
  SITE (388)..(407): This region may encompass 1-20 residues
  SITE (412)..(431): This region may encompass 1-20 residues
  SITE (436)..(455): This region may encompass 1-20 residues
  SITE (460)..(479): This region may encompass 1-20 residues
  SITE (1)..(480): This sequence may encompass 1-20 "(Gly)(Ser)(Gly)(Ser)m(Gly)" repeating units, wherein m = 1 to 20
  See specification as filed for detailed description of substitutions and preferred embodiments
GSGSSSSSSSSSSSSSSSSSSSSGGSGSSSSSSSSSSSSSSSSSSSSGGSGSSSSSSSSSSSSSSSSSSSSGGSGSSSSSSSSSSSSSSSSSSSSGGSGSSSSSSSSSSSSSSSSSSSSGGSGSSSSSSSSSSSSSSSSSSSSGGSGSSSSSSSSSSSSSSSSSSSSGGSGSSSSSSSSSSSSSSSSSSSSGGSGSSSSSSSSSSSSSSSSSSSSGGSGSSSSSSSSSSSSSSSSSSSSGGSGSSSSSSSSSSSSSSSSSSSSGGSGSSSSSSSSSSSSSSSSSSSSGGSGSSSSSSSSSSSSSSSSSSSSGGSGSSSSSSSSSSSSSSSSSSSSGGSGSSSSSSSSSSSSSSSSSSSSGGSGSSSSSSSSSSSSSSSSSSSSGGSGSSSSSSSSSSSSSSSSSSSSGGSGSSSSSSSSSSSSSSSSSSSSGGSGSSSSSSSSSSSSSSSSSSSSGGSGSSSSSSSSSSSSSSSSSSSSG

SEQ ID NO: 437 - protein, 460 aa, Artificial Sequence
  Description of Artificial Sequence: Synthetic polypeptide
  SITE (4)..(23): This region may encompass 1-20 residues
  SITE (27)..(46): This region may encompass 1-20 residues
  SITE (50)..(69): This region may encompass 1-20 residues
  SITE (73)..(92): This region may encompass 1-20 residues
  SITE (96)..(115): This region may encompass 1-20 residues
  SITE (119)..(138): This region may encompass 1-20 residues
  SITE (142)..(161): This region may encompass 1-20 residues
  SITE (165)..(184): This region may encompass 1-20 residues
  SITE (188)..(207): This region may encompass 1-20 residues
  SITE (211)..(230): This region may encompass 1-20 residues
  SITE (234)..(253): This region may encompass 1-20 residues
  SITE (257)..(276): This region may encompass 1-20 residues
  SITE (280)..(299): This region may encompass 1-20 residues
  SITE (303)..(322): This region may encompass 1-20 residues
  SITE (326)..(345): This region may encompass 1-20 residues
  SITE (349)..(368): This region may encompass 1-20 residues
  SITE (372)..(391): This region may encompass 1-20 residues
  SITE (395)..(414): This region may encompass 1-20 residues
  SITE (418)..(437): This region may encompass 1-20 residues
  SITE (441)..(460): This region may encompass 1-20 residues
  SITE (1)..(460): This sequence may encompass 1-20 "(Gly)(Gly)(Gly)(Ser)m" repeating units, wherein m = 1 to 20
  See specification as filed for detailed description of substitutions and preferred embodiments
GGGSSSSSSSSSSSSSSSSSSSSGGGSSSSSSSSSSSSSSSSSSSSGGGSSSSSSSSSSSSSSSSSSSSGGGSSSSSSSSSSSSSSSSSSSSGGGSSSSSSSSSSSSSSSSSSSSGGGSSSSSSSSSSSSSSSSSSSSGGGSSSSSSSSSSSSSSSSSSSSGGGSSSSSSSSSSSSSSSSSSSSGGGSSSSSSSSSSSSSSSSSSSSGGGSSSSSSSSSSSSSSSSSSSSGGGSSSSSSSSSSSSSSSSSSSSGGGSSSSSSSSSSSSSSSSSSSSGGGSSSSSSSSSSSSSSSSSSSSGGGSSSSSSSSSSSSSSSSSSSSGGGSSSSSSSSSSSSSSSSSSSSGGGSSSSSSSSSSSSSSSSSSSSGGGSSSSSSSSSSSSSSSSSSSSGGGSSSSSSSSSSSSSSSSSSSSGGGSSSSSSSSSSSSSSSSSSSSGGGSSSSSSSSSSSSSSSSSSSS

SEQ ID NO: 438 - protein, 100 aa, Artificial Sequence
  Description of Artificial Sequence: Synthetic polypeptide
  SITE (1)..(100): This sequence may encompass 1-50 "Gly Ser" repeating units
  See specification as filed for detailed description of substitutions and preferred embodiments
GSGSGSGSGSGSGSGSGSGSGSGSGSGSGSGSGSGSGSGSGSGSGSGSGSGSGSGSGSGSGSGSGSGSGSGSGSGSGSGSGSGSGSGSGSGSGSGSGSGS

SEQ ID NO: 439 - protein, 250 aa, Artificial Sequence
  Description of Artificial Sequence: Synthetic polypeptide
  SITE (1)..(250): This sequence may encompass 1-50 "Gly Ser Gly Gly Ser" repeating units
  See specification as filed for detailed description of substitutions and preferred embodiments
GSGGSGSGGSGSGGSGSGGSGSGGSGSGGSGSGGSGSGGSGSGGSGSGGSGSGGSGSGGSGSGGSGSGGSGSGGSGSGGSGSGGSGSGGSGSGGSGSGGSGSGGSGSGGSGSGGSGSGGSGSGGSGSGGSGSGGSGSGGSGSGGSGSGGSGSGGSGSGGSGSGGSGSGGSGSGGSGSGGSGSGGSGSGGSGSGGSGSGGSGSGGSGSGGSGSGGSGSGGSGSGGSGSGGSGSGGSGSGGSGSGGSGSGGS

SEQ ID NO: 440 - protein, 200 aa, Artificial Sequence
  Description of Artificial Sequence: Synthetic polypeptide
  SITE (1)..(200): This sequence may encompass 1-50 "Gly Gly Gly Ser" repeating units
  See specification as filed for detailed description of substitutions and preferred embodiments
GGGSGGGSGGGSGGGSGGGSGGGSGGGSGGGSGGGSGGGSGGGSGGGSGGGSGGGSGGGSGGGSGGGSGGGSGGGSGGGSGGGSGGGSGGGSGGGSGGGSGGGSGGGSGGGSGGGSGGGSGGGSGGGSGGGSGGGSGGGSGGGSGGGSGGGSGGGSGGGSGGGSGGGSGGGSGGGSGGGSGGGSGGGSGGGSGGGSGGGS

SEQ ID NO: 441 - protein, 250 aa, Artificial Sequence
  Description of Artificial Sequence: Synthetic polypeptide
  SITE (1)..(250): This sequence may encompass 1-50 "Gly Gly Gly Gly Ser" repeating units
  See specification as filed for detailed description of substitutions and preferred embodiments
GGGGSGGGGSGGGGSGGGGSGGGGSGGGGSGGGGSGGGGSGGGGSGGGGSGGGGSGGGGSGGGGSGGGGSGGGGSGGGGSGGGGSGGGGSGGGGSGGGGSGGGGSGGGGSGGGGSGGGGSGGGGSGGGGSGGGGSGGGGSGGGGSGGGGSGGGGSGGGGSGGGGSGGGGSGGGGSGGGGSGGGGSGGGGSGGGGSGGGGSGGGGSGGGGSGGGGSGGGGSGGGGSGGGGSGGGGSGGGGSGGGGSGGGGS

SEQ ID NO: 442 - protein, 6 aa, Artificial Sequence
  Description of Artificial Sequence: Synthetic 6xHis tag
HHHHHH

SEQ ID NO: 443 - protein, 6 aa, Artificial Sequence
  Description of Artificial Sequence: Synthetic His tag
  SITE (1)..(6): This sequence may encompass 3-6 residues
HHHHHH
